(19) United States
(12) Patent Application Publication
(10) Pub. No.: US 2019/0284566 A1
(43) Pub. Date: Sep. 19, 2019

(54) WHEAT

(71) Applicant: ELSOMS DEVELOPMENTS LTD, Spalding, Lincolnshire (GB)

(72) Inventors: Anthony Gordon KEELING, Spalding, Lincolnshire (GB); Matthew John MILNER, Cambridge, Cambridgeshire (GB)

(73) Assignee: ELSOMS DEVELOPMENTS LTD, Spalding, Lincolnshire (GB)

(21) Appl. No.: 16/320,146

(22) PCT Filed: Jul. 20, 2017
(86) PCT No.: PCT/US2017/043009

§ 371 Date: Jan. 24, 2019

Related U.S. Application Data
(60) Provisional application No. 62/453,115, filed on Feb. 1, 2017.
(60) Provisional application No. 62/436,678, filed on Dec. 20, 2016.

(30) Foreign Application Priority Data
Jul. 29, 2016 (GB) 1613156.7

(51) Int. Cl. C12N 15/82; C12N 15/11; C12N 9/22

(52) U.S. Cl. CPC C12N 15/8218; C12N 15/11; C12N 2800/80; C12N 15/8289; C12N 2310/20; C12N 9/22

(57) ABSTRACT

Described herein are methods and compositions relating to male-sterile wheat, as well as uses thereof and methods for propagating and maintaining the same.

### CROSS-REFERENCE TO RELATED APPLICATIONS

[0001] This application claims benefit under 35 U.S.C. § 119(e) of U.S. Provisional Application Nos. 62/436,678 filed Dec. 20, 2016 and 62/453,115 filed Feb. 1, 2017 and which claims the benefit of foreign priority under 35 U.S.C. § 119(a) of UK provisional application No. 1613156.7 filed Jul. 29, 2016, the contents of which are incorporated herein by reference in their entirety.

### SEQUENCE LISTING

[0002] The instant application contains a Sequence Listing which has been submitted electronically in ASCII format and is hereby incorporated by reference in its entirety. Said ASCII copy, created on Jul. 19, 2017, is named 077524-088582_SL.txt and is 617,500 bytes in size.

### TECHNICAL FIELD

[0003] The invention relates to wheat, more particularly to male-sterile wheat and methods of producing and using it. More specifically, the invention relates to methods of producing wheat plants exhibiting genetic male-sterility (GMS), in particular by inhibiting certain wheat genes: materials useful in such methods; plants and plant populations obtainable by such methods; as well as to F1 hybrids obtainable by crossing such plants with male-fertile wheat. Wheat genes whose inhibition results in male-sterility in wheat are referred to herein as male-fertility wheat (Mfw) genes.

### BACKGROUND

[0004] Plants produce seed by the union of male and female gametes. The male gametes are carried in pollen, the female gametes in ovules. Many crop species are largely self-sterile, meaning that the progeny of a plant are mostly outcrosses, produced by cross-pollination with another plant. However, certain crop species are capable of self-pollination, as well as cross-pollination. Some self-fertile crops, among them wheat, are usually self-pollinators. Hybrid breeding systems have been developed for certain crops (one example is sugar beet) to enable a parent line without pollen to be cross-pollinated by a pollen-producing line in the seed production field thus producing F₁ seed. However many such hybrid systems do not require male-fertility, because the commercial product of the F₁ is (or is from) the vegetative part of the plant. F₁ plants of grain crops such as wheat must have their male-fertility restored in order to produce saleable grain.

[0005] Hybrid plant breeding has led to major improvements in crop yield due primarily to the benefits associated with heterosis (hybrid vigour) in F₁ hybrid plants. Development of hybrid breeding systems is, therefore, highly desirable. Also, since the parent lines most suitable for generating F₁ hybrid seed are usually not made freely available to the market, F₁ hybrids offer the plant breeder a more controllable and profitable business model, driving further development of new breeding systems, with benefits for plant breeders, farmers and consumers.

### SUMMARY

[0006] At present, there are no convenient and readily practicable methods of producing male-sterile wheat (common wheat, Triticum aestivum)—see Whitford et al (2013). The present invention provides a new method of obtaining male-sterile wheat, which avoids at least some of the inconveniences associated with or foreseeable with previously proposed methods. It further provides new male-sterile wheat plants that may be obtained by the process of the invention, and new hybrids made by crossing such male-sterile wheat with male-fertile wheat.

### FIGURES

[0007] FIG. 1 shows amino-acid sequences SEQ ID NOs 1, 2 and 3.

[0008] FIG. 2 shows amino-acid sequences SEQ ID NOs 4 and 5.

[0009] FIG. 3 shows amino-acid sequence SEQ ID NO 6 and DNA sequence SEQ ID NO 7.

[0010] FIG. 4 shows DNA sequence SEQ ID NO 10 (bases 1-3540).

[0011] FIG. 5 shows DNA sequence SEQ ID NO 10 (bases 3541-5127).

[0012] FIG. 6 shows the base sequence of the DNA insert to be introduced into the wheat genome in Example 2.

[0013] FIGS. 7 and 8 together show a schematic map of the construct used to insert the base sequence of FIG. 4 into the wheat genome; and the following Examples 1-4.

[0014] FIG. 9 depicts a schematic of an exemplary approach to generating a male-sterile wheat plant utilizing CRISPR/Cas. When the resulting plant is pollinated by a wild-type wheat plant, a male-fertile F1 hybrid will result. Figure discloses SEQ ID NOS 51-53, respectively, in order of appearance.

[0015] FIG. 10 depicts a schematic of an exemplary approach for a cytoplasmic-genome male-fertility-restorer gene system as a pollen source to maintain a male-sterile wheat plant.

[0016] FIGS. 11 and 12 depict schematics of an exemplary nuclear-genome approach to producing and maintaining a male-sterile wheat plant.

[0017] FIG. 13 depicts a schematic of an exemplary approach to reproducing a nuclear-genome or genic “maintainer/maintainer-line” for a male-sterile wheat plant.

[0018] FIG. 14 depicts a schematic of an exemplary approach to reproducing a cytoplasmic-genome “maintainer-line” for a male-sterile wheat plant.

[0019] FIG. 15 depicts a schematic of an exemplary approach to crossing a male-sterile wheat plant produced by Mfw gene knock-out, eg by CRISPR, to produce fertile F1 hybrid plants.

[0020] FIG. 16 depicts a schematic of an exemplary approach to transferring male-sterility by conventional breeding.

[0021] FIG. 17 depicts Alexander staining and FIG. 18 depicts Auramine O staining of control pollen and a plant in which Mfw1 and Mfw2 have been deactivated by RNAi silencing.

[0022] FIGS. 17A-17J depict images of pollen from RNAi plant 27 (FIGS. 17A-17E) or wild type pollen (FIGS. 17F-17J) stained with Alexander stain (FIGS. 17A, 17B, 17F, 17G) or Auramin O (FIGS. 17C-17E, 17H-17J). All pictures are shown at 100× except for 17E and 17J which are shown at 400×

[0023] FIG. 18 depicts a schematic of genetic events taking place in a genic maintainer line.

### DETAILED DESCRIPTION

[0024] Our invention includes a method of producing male-sterile wheat which comprises during the development of the wheat flower:

[0025] analysing the RNA-transcriptome of wheat stamen cells;

[0026] analysing the RNA-transcriptome of wheat pistil cells;

[0027] then comparing the two RNA-transcriptomes to identify one or more genes that at the time of flowering are preferentially expressed in stamens rather than pistils;

[0028] selecting one or more genes so identified; and

[0029] inhibiting expression of selected genes, so as to produce male-sterile wheat.

[0030] Relative transcript abundance analysis is carried out on RNA collected preferably during early-stage development of the flower, in particular during meiosis, which occurs during development of the gametes in the wheat flower as it develops while still inside the stem of the wheat plant; this can be defined as between stages 41 to 49 of the Zadoks scale, inclusive—see Zadoks et al, (1974). Wheat is hexaploid, and in many varieties/cultivars it is found that the same, or substantially the same, Mfw gene occurs more than once in the genome: in one or more of the three sets of homoeologous chromosomes. In such cases, in order to obtain male-sterile wheat, it may be necessary to deactivate this gene at each of the three loci on the homoeologous chromosomes where the gene is present. The precise loci needing to be deactivated are found by examination of plants which have had different homoeologues of the Mfw genes deactivated. (This will be evident in plants which have all homoeologs deactived after gene-editing.)

[0031] Others working in this field have worked with male-fertility genes which have clearly and effectively expressed male-fertility/-sterility in other monocot species and then tried to find orthologues expressing a male-fertility phenotype in wheat. To date, this approach has not been successful.

[0032] Additionally, many prior approaches to male-sterility involve temperature sensitivity and/or cytoplasmic male sterility (CMS). These approaches are marked by reduced yields and/or “leaky” phenotypes which render them unsuitable for commercial uses, particularly in wheat.

[0033] In contrast, the methods described herein relate to identifying genes which are expressed specifically and substantially in the wheat plant at or about meiosis (e.g., during Zadoks stages 41-49, inclusive), when the genes which are vital to pollen development and function are needed to be expressed for proper pollen development and function. In accordance with some embodiments of the invention, this range of developmental stages was identified since it encompasses expression of genes associated with pollen development and function. Also, the ear first matures in the middle and then matures to both tip and base (Zadok et. al, 1974). So, to limit the range of microsporogenesis stages in the samples to meiosis or slightly pre- or post-meiosis, juvenile flowers were selected from this middle part of the range in which immature stamens and pistils were present. Wheat, with an estimated 104,000 protein-coding genes, (see Clavijo et al, (2016)) has a large transcriptome with a polyploid genome and it is part of our invention to take this complexity into account by focusing solely on genes required for pollen development in wheat plants. Notably, forward genetic approaches (e.g., random mutagenesis followed by a survey of resulting phenotypes) are thus of minimal use in the complex genome of wheat, particularly as compared to other crop plants.

[0034] The first step of our process identifies a considerable number of genes that are preferentially expressed in wheat stamens. It is generally impractical to inhibit all of these, so a further selection is made. This may be based on a wide variety of factors. These include preferences for:
[0035] genes having homology with genes from other species previously described as being involved with pollen development or male fertility;
[0036] genes whose function in pollen development or male fertility may be inferred from their sequence;
[0037] genes that are conserved within and across species (autologous and paralogous conservation);
[0038] genes having a demonstrated male-sterile phenotype in plants.
   Practical factors may also be taken into account, such as availability and cost. A final selection may be made of genes that have homoeologous copies in at least two and preferably three out of the three wheat genomes.

[0039] Wheat genes whose inhibition results in male-sterility in wheat we term male-fertility wheat (Mfw) genes. If Mfw genes are missing from a wheat plant, or are inactive/deactivated, the wheat plant will show reduced fertility. Mfw genes may be identified by the process of our invention. Exemplary non-limiting examples of Mfw genes are provided in Table 1 and Table 2.

[0040] In one aspect of any of the embodiments, described herein is a method of producing male-sterile wheat, the method comprising inhibiting expression of at least one Mfw gene. In one aspect of any of the embodiments, described herein is a wheat plant or seed, or population of wheat plants and/or seeds which is predominantly male-sterile and comprises one or more deactivated Mfw genes. In one aspect of any of the embodiments, described herein is a process of obtaining wheat hybrids, the method comprising crossing a population which is predominantly male-sterile and comprises one or more deactivated Mfw genes with pollen from male-fertile wheat. In one aspect of any of the embodiments, described herein is a hybrid or population of hybrids produced by crossing a population which is predominantly male-sterile and comprises one or more deactivated Mfw genes with male-fertile wheat.

[0041] In some embodiments of any of the aspects, a gene can be preferentially expressed in wheat stamens as compared to wheat pistils. Genes with such an expression pattern are referred to herein as male-fertility preferential expression in wheat (Mpew) genes. In some embodiments of any of the aspects, the expression level of a given gene in wheat stamens and pistils can be the expression level occurring between stages 41 to 49 of the Zadoks scale, inclusive. In some embodiments of any of the aspects, the expression level of a given gene in wheat stamens and pistils can be the expression level occurring during or about meiosis. In some embodiments of any of the aspects, the expression level of a given gene in wheat stamens and pistils can be the expression level occurring during meiosis. In some embodiments of any of the aspects, preferentially expressed refers to an expression level which is at least 1.5×, e.g., at least 2×, at least 2.5×, at least 3×, at least 5×, at least 10×, at least 20×, at least 30×, at least 50×, at least 100×, or greater in the preferred tissue as compared to the reference tissue (e.g., in wheat stamens as compared to wheat pistils).

[0042] In one aspect of any of the embodiments, described herein is a method of producing male-sterile wheat, the method comprising inhibiting expression of at least one Mpew gene. In one aspect of any of the embodiments, described herein is a wheat plant or seed, or population of wheat plants and/or seeds which is predominantly male-sterile and comprises one or more deactivated Mpew genes. In one aspect of any of the embodiments, described herein is a process of obtaining wheat hybrids, the method comprising crossing a population which is predominantly male-sterile and comprises one or more deactivated Mpew genes with male-fertile wheat. In one aspect of any of the embodiments, described herein is a hybrid or population of hybrids produced by crossing a population which is predominantly male-sterile and comprises one or more deactivated Mpew genes with male-fertile wheat.

[0043] In some embodiments of any of the aspects, a gene can be both a Mfw and an Mpew gene, e.g., the gene can be preferentially expressed in wheat stamens versus wheat pistils and when deactivated, the gene results in wheat male-sterility (e.g., a Mfw/Mpew gene). In any embodiment of a method or composition in which reference to a Mfw gene is made herein, alternative embodiments comprising a Mpew and/or an Mfw/Mpew gene are specifically contemplated. Our invention includes male-infertile wheat plants containing one or more Mfw genes identified by the process of the invention as important to the callose-synthesis aspect of male-fertility, expression of which has been inhibited. Such specific Mfw genes (Mfw2-A, Mfw2-B and Mfw2-D) include those having gene sequences corresponding to those shown in SEQ ID NOs 7-12, and genes having at least 90% and preferably at least 95% or 97% identity therewith. The invention further includes male-infertile wheat plants in which a selected Mfw gene codes for an amino-acid sequence identical, or having corresponding function and least 80%, preferably 95% or 97% identity, with any of SEQ ID NOs 1-6.

[0044] In some embodiments of any of the aspects, a Mfw and/or Mpew gene can be a gene selected from Table 1 or 2. In some embodiments of any of the aspects, a Mfw and/or Mpew gene can be a homolog, ortholog, and/or variant of a gene selected from Table 1 or 2. In some embodiments of any of the aspects, a Mfw and/or Mpew gene can be a gene with at least 90%, at least 95%, at least 97% or greater amino acid sequence identity with a gene selected from Table 1 or 2. In some embodiments of any of the aspects, a Mfw and/or Mpew gene can be a gene with at least 90%, at least 95%, at least 97% or greater nucleic acid sequence identity with a gene selected from Table 1 or 2.

[0045] The sequences provided in Tables 1 and 2 are the sequences for the identified genes in the Fielder variety of wheat. In some embodiments of any of the aspects, a Mfw and/or Mpew gene can be the gene from a wheat variety other than Fielder which has the highest degree of homology and/or sequence identity with a gene selected from Table 1 or 2. In some embodiments of any of the aspects, a Mfw and/or Mpew gene can be the gene from a wheat variety other than Fielder which has the greatest degree of homology and/or sequence identity with a gene selected from Table 1 or 2.

[0046] Examples of specific Mfw genes that we have identified by the process of the invention are Mfw1 genes, Mfw2 genes, Mfw3 and Mfw5 genes. Mfw1 genes have homology with the gene for Ruptured Pollen Grain 1 (RPG1) (Sun M-X et al, 2013); Mfw2 genes with the gene for Callose Synthase (CalS5) (Dong et al., 2006). Both RPG1 and CalS5 are known genes in other non-cereal plant species that have been found to be involved in pollen formation. While others have found sequences in the Triticum genus that resemble genes in Table 1, no phenotypic evidence of a role in wheat plant male sterility for any of the Mfw genes described herein, nor sequences related thereto exists to date. Provided herein is such evidence of the function of certain genes in male sterility, e.g., for their use in hybrid wheat production.

[0047] Both Mfw1 and Mfw2 are found on each of the three sets of homoeologous chromosomes of wheat; we term these Mfw1-A, Mfw1-B, Mfw1-D, Mfw2-A, Mfw2-B and Mfw2-D according to the wheat genome (A, B or D) in which they have been found. The amino-acid sequence for which Mfw1-A codes is shown in SEQ ID NO: 01, Mfw1-B in SEQ ID NO: 02, Mfw1-D in SEQ ID NO: 03 and the amino-acid sequence for which Mfw2-A codes is shown in SEQ ID NO: 04, Mfw2-B in SEQ ID NO: 05 and Mfw2-D in SEQ ID NO: 06. The amino acid sequence for which Mfw3-A codes is shown in SEQ ID NO: 30. The amino acid sequence for which Mfw3-B codes is shown in SEQ ID NO: 31. The amino acid sequence for which Mfw3-D codes is shown in SEQ ID NO: 32. The amino acid sequence for which Mfw5-A codes is shown in SEQ ID NO: 33. The amino acid sequence for which Mfw5-B codes is shown in SEQ ID NO: 34. The amino acid sequence for which Mfw5-D codes is shown in SEQ ID NO: 35.

[0048] In some embodiments, the one or more Mfw and/or Mpew genes are: Mfw1 andMfw2; Mfw1 andMfw3; Mfw1 andMfw5; Mfw2 andMfw3; Mfw2 andMfw5; Mfw3 andMfw5; Mfw1, Mfw2, and Mfw3; Mfw1, Mfw2 and Mfw5; Mfw1, Mfw3 and Mfw5; Mfw2, Mfw3, and Mfw5; or Mfw1, Mfw2, Mfw3 andMfw5.

[0049] Our invention includes a process of producing male-sterile wheat which comprises inhibiting expression of Mfw genes that code for any of the amino-acid sequences shown in FIGS. 3 and 4, SEQ ID NOs 1-6 and/or 30-35 or for amino-acid sequences of corresponding function that have at least 60% and preferably at least 90%, particularly at least 95% sequence identity with those amino-acid sequences. % Sequence identity is the percentage of characters that match exactly when a first sequence is compared with a second sequence of the same or longer length. Gaps are not counted.

[0050] Percent identity of two proteins may be determined by comparison using available software tools, eg ‘BLAST’.

[0051] Our invention further provides a population of wheat plants that are male-sterile in consequence of the non-expression of at least one Mfw gene that is necessary for viable pollen production. Preferably the population comprises at least 50%, particularly 90%, 95% or 99%, of substantially genetically-uniform pollen-sterile seeds. Within the term ‘plants’ in this specification we include seeds and seedlings.

[0052] In one aspect, described herein is a population of wheat plants that are male sterile and comprising a deactivated Mfw and/or Mpew gene as described herein and/or or comprising a deactivating modification of a Mfw and/or Mpew gene as described herein. In some embodiments of any of the aspects, the population is substantially genetically uniform. In some embodiments of any of the aspects, the population is substantially genetically uniform at the locus and/or loci at which deactivating modifications have been made. In some embodiments of any of the aspects, the population is substantially genetically identical at each copy of the locus and/or loci at which deactivating modifications have been made. In some embodiments of any of the aspects, the population is genetically identical at the locus and/or loci at which deactivating modifications have been made. In some embodiments of any of the aspects, the population is genetically identical at each copy of the locus and/or loci at which deactivating modifications have been made. In some embodiments of any of the aspects, the population consists of individuals of the same genetic background, line and/or variety.

[0053] Another aspect of the present invention provides a process for producing a pollen-sterile wheat plant from a pollen-fertile wheat plant having an Mfw and/or Mpew gene, the process comprising deactivating an Mfw and/or Mpew gene of the pollen-fertile wheat plant. As used herein, a “deactivated” gene is one that, due to engineering and/or modification of the genome (both chromosomal and/or extrachromosomal) of the cell in which the gene is found, is expressed at less than 35% of the wild-type level of functional polypeptide. In some embodiments of any of the aspects, a deactivated gene is expressed at less than 30% of the wild-type level of functional polypeptide. In some embodiments of any of the aspects, a deactivated gene is expressed at less than 25% of the wild-type level of functional polypeptide. In some embodiments of any of the aspects, a deactivated gene is expressed at less than 20% of the wild-type level of functional polypeptide. In some embodiments of any of the aspects, a deactivated gene is expressed at less than 15% of the wild-type level of functional polypeptide.

[0054] The wild-type level of functional polypeptide can be the level of functional polypeptide found in the same type of cell not comprising the modification. In some embodiments of any of the aspects, the level of functional polypeptide can be the level of full-length polypeptide with a wild-type sequence.

[0055] In some embodiments of any of the aspects, deactivation of a gene can comprise engineering, modifying, and/or altering the genome of the cell in which the gene is found such that the cell expresses no more than 35% of the wild-type level of the polypeptide, inclusive of both full-length and partial sequences of the gene. In some embodiments of any of the aspects, a deactivated gene is expressed at less than 30% of the wild-type level of polypeptide, inclusive of both full-length and partial sequences of the gene. In some embodiments of any of the aspects, a deactivated gene is expressed at less than 25% of the wild-type level of polypeptide, inclusive of both full-length and partial sequences of the gene. In some embodiments of any of the aspects, a deactivated gene is expressed at less than 20% of the wild-type level of polypeptide, inclusive of both full-length and partial sequences of the gene. In some embodiments of any of the aspects, a deactivated gene is expressed at less than 15% of the wild-type level of polypeptide, inclusive of both full-length and partial sequences of the gene.

[0056] In some embodiments of any of the aspects, deactivation of a gene can comprise engineering, modifying, and/or altering the genome of the cell in which the gene is found such that the cell expresses polypeptides comprising no more than 35% of the wild-type sequence of the polypeptide. In some embodiments of any of the aspects, deactivation of a gene can comprise engineering, modifying, and/or altering the genome of the cell in which the gene is found such that the cell expresses polypeptides comprising no more than 30% of the wild-type sequence of the polypeptide. In some embodiments of any of the aspects, deactivation of a gene can comprise engineering, modifying, and/or altering the genome of the cell in which the gene is found such that the cell expresses polypeptides comprising no more than 25% of the wild-type sequence of the polypeptide. In some embodiments of any of the aspects, deactivation of a gene can comprise engineering, modifying, and/or altering the genome of the cell in which the gene is found such that the cell expresses polypeptides comprising no more than 20% of the wild-type sequence of the polypeptide. In some embodiments of any of the aspects, deactivation of a gene can comprise engineering, modifying, and/or altering the genome of the cell in which the gene is found such that the cell expresses polypeptides comprising no more than 15% of the wild-type sequence of the polypeptide. In some embodiments of any of the aspects, deactivation of a gene can comprise engineering, modifying, and/or altering the genome of the cell in which the gene is found such that the cell expresses polypeptides comprising no more than 10% of the wild-type sequence of the polypeptide. The invention further contemplates crossing male-sterile wheat obtainable by the process of the invention with male-fertile wheat to produce F1 hybrids, as well as hybrids so produced. A significant advantage of our invention is that it can, using gene editing technology, knockout Mfw genes and produce a recessive male-sterility genotype, mfw/mfw. This can allow F1 hybrids to be made by pollination with a wide range of wild-type male-fertile wheats that have endogenous dominant male-fertility Mfw/Mfw genes. In the next generation, such F1 hybrids resulting from our invention, are heterozygous Mfw/mfw, and so are fertile due to the dominance of the wild-type Mfw allele. In contrast, in some other hybrid systems, male-fertile pollinator lines need to be specially bred to incorporate a gene to restore fertility in the next generation, i.e., in the F1 plants in farmer-customers' fields (Whitford et al, 2013).

[0057] In some embodiments of any of the aspects, a population of plants as described herein can be at least 97% male-sterile, e.g., at least 97% male-sterile, at least 98% male-sterile, at least 99% male sterile, or 100% male-sterile. In some embodiments of any of the aspects, a population of plants as described herein can be at least 98% male-sterile. In some embodiments of any of the aspects, a population of plants as described herein can be at least 99% male-sterile. In some embodiments of any of the aspects, a population of plants as described herein can be 100% male-sterile. Male-sterile phenotypes described in other species can be of commercial value with even a partial male-sterility phenotype. Furthermore male-fertility genes in such other species, particularly diploid species, which have been mutated may be expected to express a male-sterility phenotype. If, as is often the case, those other plants species are 1) prone to cross-pollinate and/or 2) self-pollination is readily reduced or inhibited (e.g., detasseling of corn plants) a larger element of male-fertility may be acceptable in a male-sterile-based hybrid system in such species. In contrast, male-sterile wheat plants must demonstrate a phenotype that is significantly less “leaky” than what can be tolerated in other crops because wheat plants are much more likely to self-pollinate than other crop plants and physical interference with self-pollination is not practicable.

[0058] In some embodiments of any of the aspects, the male-sterile plants and/or hybrid plants described herein have a yield which is no less than 90% of the yield of a wild-type wheat plant of the same strain. In some embodiments of any of the aspects, the male-sterile plants and/or hybrid plants described herein have a yield which is no less than 95% of the yield of a wild-type wheat plant of the same strain. In some embodiments of any of the aspects, the male-sterile plants and/or hybrid plants described herein have a yield which is no less than 98% of the yield of a wild-type wheat plant of the same strain. Inhibition of Mfw genes may be carried out in various ways. Preferably inhibition of Mfw genes is carried out by targeted modification of the wheat genome, by additions or by deletions or by a combination of the two. Two main ways visualised by the invention are: by modifying the wheat genome so as to express RNA that inhibits expression of the identified Mfw gene; or by gene-editing to prevent the Mfw gene carrying out its function.

[0059] The transcriptome of a group of cells is the set of all RNA fragments generated in the cells at a particular time, including information about their relative abundance. It may be generated in various ways, in particular by DNA microarrays, or more preferably by the known technique of RNA-seq (whole transcriptome shotgun sequencing). This technique is described in more detail in Trick et al., (2012) and Harrison et al., (2015).

[0060] The whole wheat genome has previously been sequenced, and published. Sequences are given in Chapman et al (2014) and Clavijo et al, (2016) and were downloadable from, e.g., TGAC, The Genome Analysis Centre, Norwich in January 2016 and subsequently published in October 2016 as part of Clavijo et al., 2016. (available on the world wide web at ftp.ensemblgenomes.org/pub/plants/pre/fasta/triticum_aestivum/dna/). We have also sequenced the coding sequences for Mfw1 and Mfw2 in each of the three chromosome pairs of hexaploid wheat from the variety Fielder. These are shown in SEQ ID NOs 7-12 below. Our ‘Fielder’ sequences are very similar to but not identical with those obtained by TGAC (analysing variety Chinese Spring), Clavijo et al, (2016), and Chapman et al (2014) (which in turn differ slightly from each other). This is inevitable. Modern gene sequencing methods have a low but finite error rate—also the samples of wheat being sequenced may themselves have minor differences amongst and within different varieties. In selecting sequences of Mfw genes for use in the present invention, suitable coding sequences as shown as part of any of SEQ ID NOs 7-12 are preferred, but sequences from Clavijo et al, (2016), Chapman et al (2014) or TGAC (or any other academic publication) may also be useful. Further, Mfw genes may be inactivated by editing or deleting their associated promoter sequences. For example, the expression of Mfw1-A in variety Chinese Spring may be inhibited by editing of bases upstream (5′) of the start codon ATG at position 6072 of SEQ ID NO 13 so as to disrupt the action of the gene promoter. The position and number of the bases that must be removed, inserted or replaced so as to disrupt the action of the gene promoter may be determined by trial and error.

[0061] Individual modifications may be referred to herein as “deactivating modifications.” The phrase “deactivating modification” refers to a modification of an individual nucleic acid sequence and/or copy of a gene, which may or may not, on its own, result in deactivation of the desired gene. For example, deactivating modifications at all six copies of a given gene may be necessary to deactivate the gene. Furthermore, it is contemplated herein that the deactivating modification found at any given copy of a gene may or may not be identical to the deactivating modification found at the remaining copies of that gene.

[0062] In the context of a type of modification that is made at a location in the genome other than at the gene to be deactivated, a single modification may be sufficient to deactivate the gene (e.g, the introduction of an inhibitory nucleic acid). However, multiple copies of such modifications, at additional alleles and/or loci may be desirable to prevent “leaky”, imperfect or unreliable phenotype or prevent loss of the desired phenotypes in subsequent generations.

[0063] In the context of a type of modification that is made at the gene to be deactivated, e.g, an indel at the coding sequence of the gene, it can be necessary to introduce deactivating modifications at additional copies of the gene (e.g., at all six copies of a given homoeologous gene set in wheat) in order to effect deactivation of the gene. Accordingly, a modification at the gene to be deactivated is considered a deactivating modification if it deactivates the copy of the gene in which it occurs, regardless of its effect on other copies of the gene.

[0064] The inhibition and/or deactivation of an Mfw and/or Mpew gene, e.g., one identified according to the invention may be carried out by generation of interfering mRNA (RNAi). For example, the Mfw gene may be deactivated by RNAi repression, e.g., from an introgressed transgene designed for this purpose. An instance of this technique is illustrated in Example 3 below. Or deactivation may be by another form of genetic modification—for example by expressing a second copy of the relevant gene (or part of it) in reverse, to silence the gene.

[0065] In some embodiments of any of the aspects, a deactivating modification can be a modification that introduces an inhibitory nucleic acid into the cell, e.g, an RNAi, siRNA, shRNA, endogenous microRNA and/or artificial microRNA. The inhibitory nucleic acids described herein can include an RNA strand (the antisense strand) having a region which is 30 nucleotides or less in length, i.e., 15-30 nucleotides in length, generally 19-24 nucleotides in length, which region is substantially complementary to at least part the targeted mRNA transcript. The use of these iRNAs enables the targeted degradation of mRNA transcripts, resulting in decreased expression and/or activity of the target. An inhibitory nucleic acid mediates the targeted cleavage of a target RNA transcript, e.g., via an RNA-induced silencing complex (RISC) pathway, thereby inhibiting the expression and/or activity of the target, e.g, deactivating the target gene.

[0066] As described elsewhere herein, wheat has a hexaploid genome. Accordingly, in some embodiments, more than one copy of an inhibitory nucleic acid can be necessary in order to inhibit target gene(s) expression sufficiently to cause a male-sterile phenotype. In some embodiments of any of the aspects, a deactivating modification can comprise 1 or more copies of nucleic acid encoding an inhibitory nucleic acid. In some embodiments of any of the aspects, a deactivating modification can comprise 2 or more copies of nucleic acid encoding an inhibitory nucleic acid. In some embodiments of any of the aspects, a deactivating modification can comprise 3 or more copies of nucleic acid encoding an inhibitory nucleic acid. In some embodiments of any of the aspects, a deactivating modification can comprise 4 or more copies of nucleic acid encoding an inhibitory nucleic acid. In some embodiments of any of the aspects, a deactivating modification can comprise 5 or more copies of nucleic acid encoding an inhibitory nucleic acid. Multiple copies of a nucleic acid encoding an inhibitory nucleic acid can be integrated into the genome at the same loci (e.g., in series), or different loci.

[0067] In some embodiment of any of the aspects, the inhibitory nucleic acid can comprise SEQ ID NO: 19. In some embodiment of any of the aspects, the inhibitory nucleic acid can comprise a sequence with at least 90% identity, at least 95% identity, or at least 98% identity with SEQ ID NO: 19. In some embodiment of any of the aspects, the inhibitory nucleic acid can comprise a hairpin molecule comprising SEQ ID NO: 19 and the reverse complement of SEQ ID NO: 19. In some embodiment of any of the aspects, the inhibitory nucleic acid can comprise a sequence with at least 90% identity, at least 95% identity, or at least 98% identity with SEQ ID NO: 19 and a sequence with at least 90% identity, at least 95% identity, or at least 98% identity with the reverse complement of SEQ ID NO: 19.

[0068] Alternatively an Mfw and/or Mpew gene may be inhibited by gene-editing so that it no longer fulfils its function (‘gene knockout’). A variety of general methods is known for gene editing. Such editing may involve additions to or deletions from the gene coding sequence or from control (regulatory) sequences upstream or downstream of the coding sequence, but in any case is such as to inhibit production of functional RNA transcript. For example, a gene might be knocked out by inserting one or more additional base pairs of DNA resulting in coding for one or more unsuitable amino-acids, or by creating a premature stop codon so as to substantially shorten the resulting RNA transcript. In a preferred mode of our invention, gene editing comprises only deletion of DNA base sequence. Such editing by deletion, because it contains no additional or heterogenous DNA, is often regarded as environmentally safer and so may require less extensive, and hence less expensive and time-consuming, regulation.

[0069] Accordingly, in some embodiments of any of the aspects, a deactivating modification can be a modification that interrupts and/or alters the wild-type coding sequence of the gene, e.g., by deletions which generate a stop codon, transposon, deletion, or frameshift in the coding sequence of the gene.

[0070] Several methods of gene-editing are known. Such editing may be done using by various methods, including site-directed mutagenesis employing site-specific nucleases, for example transcription activator-like effector nucleases (TALENs), oligonucleotides, meganucleases, and zinc-finger nucleases. Toolkits and services for zinc-finger nuclease mutagenesis are commercially available, for example EXZACT™ Precision Technology, marketed by Dow AgroSciences.

[0071] Particularly preferred methods for gene-editing are the recently-discovered CRISPR-associated (Cas) systems such as CRISPR-Cas9. CRISPR is an acronym for clustered regularly interspaced short palindromic repeats). CRISPR-Cas technology for editing of plant genomes is fully described in Belhaj et al. (2015). This is a practicable, convenient and flexible method of gene editing. It has been shown to work well in plants, see for example in Belhaj et al. (2015) and Shan et al. (2014). The latter paper gives full protocols to enable the system to be applied to modify plant genomes (including wheat) as desired.

[0072] As described herein, a deactivating modification can be introduced by utilizing the CRISPR/Cas system. In some embodiments of any of the aspects, a plant or seed with a deactivated Mfw and/or Mpew gene can further comprise an exogenous or introduced endonuclease or a nucleic acid encoding such an endonuclease (e.g., Cas9, a Cas9-derived nickase, or a Cas9 homolog (e.g., Cpf1)). In some embodiments of any of the aspects, a plant or seed with a deactivated Mfw and/or Mpew gene can further comprise a CRISPR RNA sequence designed to target an endonuclease to the gene, e.g. (a crRNA and trans-activating crRNA (tracrRNA) and/or a guide RNA (sgRNA)). Briefly, in order for a Cas9 nuclease (or related nuclease) to recognize and cleave a target nucleic acid molecule, a CRISPR RNA (crRNA) and trans-activating crRNA (tracrRNA) must be present. crRNAs hybridize with tracrRNA to form a guide RNA (sgRNA) which then associates with the Cas9 nuclease. Alternatively, the sgRNA can be provided as a single contiguous sgRNA. Once the sgRNA is complexed with Cas9, the complex can bind to a target nucleic acid molecule. The sgRNA binds specifically to a complementary target sequence via a target-specific sequence in the crRNA portion (e.g., the spacer sequence), while Cas9 itself binds to a protospacer adjacent motif (CRISPR/Cas protospacer-adjacent motif; PAM). The Cas9 nuclease then mediates cleavage of the target nucleic acid to create a double-stranded break within the sequence bound by the sgRNA. In some embodiments of any of the aspects, the sgRNA is provided as a single continuous nucleic acid molecule. In some embodiments of any of the aspects, the sgRNA is provided as a set of hybridized molecules, e.g., a crRNA and tracrRNA. In some embodiments of any of the aspects, the sgRNA is provided as a DNA molecule encoding a sgRNA and/or a crRNA and tracrRNA. Design of sgRNAs, crRNAs, and tracrRNAs are known in the art and described elsewhere herein. Exemplary sgRNA sequences for Mfw1, Mfw2, Mfw3, and Mfw5 are provided elsewhere herein.

[0073] In alternative embodiments, a deactivating modification can be introduced by utilizing TALENs or ZFN technology, which are known in the art. Methods of engineering nucleases to achieve a desired sequence specificity are known in the art and are described, e.g., in Kim (2014); Kim (2012); Belhaj et al. (2013); Urnov et al. (2010); Bogdanove et al. (2011); Jinek et al. (2012) Silva et al. (2011); Ran et al. (2013); Carlson et al. (2012); Guerts et al. (2009); Taksu et al. (2010); and Watanabe et al. (2012); each of which is incorporated by reference herein in its entirety.

[0074] In embodiments where multiple genes are to be deactivated, e.g., multiple members of a gene family, deactivating modifications can be targeted to shared sequences to minimize the number of modifications and/or individual reagents. Alternatively, deactivating modifications can be targeted to areas that are unique to each gene and a multiplexed approach can be taken. By way of non-limiting example, a gene family can be deactivated utilizing a single CRISPR sgRNA (or equivalent) if the sgRNA is targeted to a sequence found in all members of the gene family; or the gene family can be deactivated utilizing multiple CRISPR sgRNAs (or equivalents) if the sgRNAs are each targeted to sequences not found in each member of the gene family.

[0075] In some embodiments of any of the aspects, deactivating modifications can be introduced by means of a mutagen, e.g., ethyl methane sulphonate (EMS), radiation, UV light, aflatoxin B 1, nitrosoguanidine (NG), formaldehyde, acetaldehyde, diepoxyoctane (DEO), depoxybutane (DEB), diethyl sulphate (DES), methylnitrontrosoguanidine (NTG), N-ethyl-N-nitrosourea (ENU), and trimethylpsoralen (TMP). In some embodiments of any of the aspects, deactivating modifications can be introduced, selected, and/or identified by means of TILLING (Targeted Induced Local Lesions IN Genomes) which uses mutagens to generate mutations. TILLING is described in detail, e.g., in Kurowska et al. J Appl Genet 2011 52:371-390 and McCallum et al. Plant Physiol 2000 123:439-442, which are incorporated by reference herein in their entireties.

[0076] In some embodiments of any of the aspects, deactivating modifications can be introduced by non-transgenic mutagenesis, e.g., by a method which causes mutations of the nucleic acid sequences of the wheat genome without introducing foreign and/or exogenous nucleic acid molecules into the wheat cell. In some embodiments, non-transgenic mutagenesis can comprise insertions and/or deletions due to mutagenic activity, e.g., indels arising from damage and/or repair processes in the cell. Non-transgenic mutagenesis can utilize, e.g., chemical mutagens (e.g., mutagens not comprising a nucleic acid sequence) and/or radiation sources (e.g., UV light). Non-transgenic mutagenesis excludes the use of, e.g., transposon insertions and/or RNAi. In some embodiments of any of the aspects, non-transgenic mutagenesis does not comprise the use of a site-specific nuclease, e.g., CRISPR-Cas. In some embodiments of any of the aspects, non-transgenic mutagenesis can be used in, e.g., TILLING approaches to generate and/or identify deactivating modifications.

[0077] In some embodiments of any of the aspects, the deactivating modification is not a naturally occurring modification, mutation, and/or allele.

[0078] In order for a gene to be deactivated, it is necessary to reduce the expression from multiple alleles or copies, e.g., wheat is a hexaploid genome and it may be necessary to reduce expression from all six copies of a given gene. Accordingly, in some embodiments of any of the aspects, a deactivating modification is present at all six copies of a given deactivated gene. The individual deactivating modifications can be identical or they can vary.

[0079] In some embodiments of any of the aspects, the deactivation of a first gene can further comprise deactivation of one or more further related genes which display functional redundancy with the first gene. In some embodiments, a plant or cell in which a given gene is deactivated can comprise deactivating modification(s) that deactivate all members of that gene's family. In some embodiments, a plant or cell in which a given gene is deactivated can comprise deactivating modification(s) that deactivate all genes with at least 30% sequence identity at the amino acid level to the gene. In some embodiments, a plant or cell in which a given gene is deactivated can comprise deactivating modification(s) that deactivate all genes with at least 40% sequence identity at the amino acid level to the gene. In some embodiments, a plant or cell in which a given gene is deactivated can comprise deactivating modification(s) that deactivate all genes with at least 50% sequence identity at the amino acid level to the gene. In some embodiments, a plant or cell in which a given gene is deactivated can comprise deactivating modification(s) that deactivate all genes with at least 60% sequence identity at the amino acid level to the gene. In some embodiments, a plant or cell in which a given gene is deactivated can comprise deactivating modification(s) that deactivate all genes with at least 70% sequence identity at the amino acid level to the gene. In some embodiments, a plant or cell in which a given gene is deactivated can comprise deactivating modification(s) that deactivate all genes with at least 80% sequence identity at the amino acid level to the gene. In some embodiments, a plant or cell in which a given gene is deactivated can comprise deactivating modification(s) that deactivate all genes with at least 90% sequence identity at the amino acid level to the gene. In some embodiments, a plant or cell in which a given gene is deactivated can comprise deactivating modification(s) that deactivate all genes with at least 30% sequence identity at the nucleotide level to the gene. In some embodiments, a plant or cell in which a given gene is deactivated can comprise deactivating modification(s) that deactivate all genes with at least 40% sequence identity at the nucleotide level to the gene. In some embodiments, a plant or cell in which a given gene is deactivated can comprise deactivating modification(s) that deactivate all genes with at least 50% sequence identity at the nucleotide level to the gene. In some embodiments, a plant or cell in which a given gene is deactivated can comprise deactivating modification(s) that deactivate all genes with at least 60% sequence identity at the nucleotide level to the gene. In some embodiments, a plant or cell in which a given gene is deactivated can comprise deactivating modification(s) that deactivate all genes with at least 70% sequence identity at the nucleotide level to the gene. In some embodiments, a plant or cell in which a given gene is deactivated can comprise deactivating modification(s) that deactivate all genes with at least 80% sequence identity at the nucleotide level to the gene. In some embodiments, a plant or cell in which a given gene is deactivated can comprise deactivating modification(s) that deactivate all genes with at least 90% sequence identity at the nucleotide level to the gene.

[0080] It is contemplated herein that such further related gene(s) can be deactivated by the same type of modification (e.g., the first gene is deactivated by modifying the gene with CRISPR/Cas and the further related gene(s) are deactivated by modifying the further related genes(s) with CRISPR/Cas); with the same modification step (e.g., the first gene is deactivated by modifying the gene with CRISPR/Cas and the further related gene(s) are simultaneously deactivated by modifying the further related genes(s) with the same CRISPR/Cas array, wherein the array targets sequences shared between the first and further genes); or by separate types of modifications (e.g., the first gene is deactivated by modifying the gene with CRISPR/Cas and the further related gene(s) are deactivated by introducing an RNAi construct that targets the further related genes).

[0081] Producing male-sterile plants according to the invention may be carried out as follows. Transgenic technology is used to deactivate one or more Mfw genes, for example the Mfw1, Mfw2, Mfw3 and/or Mfw5 genes. Transformation vectors are designed to repress expression of the gene using gene silencing technology. In one application, an RNAi construct is designed and used to produce a quantitative effect on expression of at least one Mfw gene, for example Mfw1. A range of different sterility phenotypes may be produced in this way for assessment. In a second application, a synthetic micro RNA construct is designed and used to achieve complete suppression of an Mfw gene, for example Mfw1. In both applications, Agrobacterium transfer may be used to introduce the constructs into wheat immature embryo cells from which whole wheat plants are derived, for example using known well-established selection and regeneration protocols (e.g., those given in Risacher et al., (2009)).

[0082] In one aspect, described herein is a wheat plant or seed that is male-sterile as a result of deactivation of one or more Mfw genes. In one aspect, described herein is a wheat plant or seed that is male-sterile as a result of deactivation of one or more Mpew genes.

[0083] In one aspect, described herein is a wheat plant or seed that is male-sterile and comprises a deactivating modification of one or more Mfw genes. In one aspect, described herein is a wheat plant or seed that is male-sterile and comprises a deactivating modification of one or more Mpew genes. In one aspect, described herein is a wheat plant or seed that is male-sterile and comprises a deactivating modification at each copy of one or more Mfw genes. In one aspect, described herein is a wheat plant or seed that is male-sterile and comprises a deactivating modification at each copy of one or more Mpew genes. In one aspect, described herein is a hybrid wheat plant and/or seed comprising at least one copy of a Mfw gene comprising a deactivating modification and at least one wild-type copy of the same Mfw gene. In one aspect, described herein is a hybrid wheat plant and/or seed comprising at least one copy of a Mpew gene comprising a deactivating modification and at least one wild-type copy of the same Mpew gene. In one aspect, described herein is a hybrid wheat plant and/or seed comprising at least three copies of a Mfw gene comprising a deactivating modification and three wild-type copies of the same Mfw gene. In one aspect, described herein is a hybrid wheat plant and/or seed comprising at least three copies of a Mpew gene comprising a deactivating modification and three wild-type copies of the same Mpew gene. In one aspect, described herein is a hybrid wheat plant and/or seed comprising at three copies of a Mfw gene comprising a deactivating modification and three wild-type copies of the same Mfw gene. In one aspect, described herein is a hybrid wheat plant and/or seed comprising three copies of a Mpew gene comprising a deactivating modification and three wild-type copies of the same Mpew gene.

[0084] In one aspect of any of the embodiments, described herein is a population of hybrid wheat plants comprising at least one copy of a Mfw gene comprising a deactivating modification and at least one wild-type copy of the same Mfw gene. In one aspect of any of the embodiments, described herein is a population of hybrid wheat plants comprising at least one copy of a Mpew gene comprising a deactivating modification and at least one wild-type copy of the same Mpew gene.

[0085] FIG. 15 depicts an illustrative example of the breeding of hybrid plants as described herein. The male sterile plants described herein can be crossed with standard wheat lines which are wild type and dominant for the Mfw and/or Mpew genes. The offspring will be F1 hybrid lines which are male-fertile.

[0086] The invention will now be further described with reference to the drawings and the accompanying SEQ IDs NOs 1-19, wherein

[0087] SEQ ID NO 1 is the amino-acid sequence for which Mfw1-A codes

[0088] SEQ ID NO 2 is the amino-acid sequence for which Mfw1-B codes

[0089] SEQ ID NO 3 is the amino-acid sequence for which Mfw1-D codes

[0090] SEQ ID NO 4 is the amino-acid sequence for which Mfw2-A codes

[0091] SEQ ID NO 5 is the amino-acid sequence for which Mfw2-B codes

[0092] SEQ ID NO 6 is the amino-acid sequence for which Mfw2-D codes

[0093] SEQ ID NO 7 is the DNA coding sequence (from start codon to stop codon inclusive) of Mfw1-A from wheat (Triticum aestivum, variety ‘Fielder’)

[0094] SEQ ID NO 8 is the DNA coding sequence (from start codon to stop codon inclusive) of Mfw1-B from wheat (Triticum aestivum, variety ‘Fielder’)

[0095] SEQ ID NO 9 is the DNA coding sequence (from start codon to stop codon inclusive) of Mfw1-D from wheat (Triticum aestivum, variety ‘Fielder’)

[0096] SEQ ID NO 10 is the DNA coding sequence (from start codon to stop codon inclusive) of Mfw2-A from wheat (Triticum aestivum, variety ‘Fielder’)

[0097] SEQ ID NO 11 is the DNA coding sequence (from start codon to stop codon inclusive) of Mfw2-B from wheat (Triticum aestivum, variety ‘Fielder’)

[0098] SEQ ID NO 12 is the DNA coding sequence (from start codon to stop codon inclusive) of Mfw2-D from wheat (Triticum aestivum, variety ‘Fielder’)

[0099] SEQ ID NO 13 is a partial sequence of chromosome 7A of wheat (Triticum aestivum, variety ‘Chinese Spring’) including Mfw1-A

[0100] SEQ ID NO 14 is a partial sequence chromosome 7A of wheat (Triticum aestivum, variety ‘Chinese Spring’) including Mfw2-A

[0101] SEQ ID NO 15 is a partial sequence of chromosome 7B of wheat (Triticum aestivum, variety ‘Chinese Spring’) including Mfw1-B

[0102] SEQ ID NO 16 is a partial sequence of chromosome 7B of wheat (Triticum aestivum, variety ‘Chinese Spring’) including Mfw2-B

[0103] SEQ ID NO 17 is a partial sequence of chromosome 7D of wheat (Triticum aestivum, variety ‘Chinese Spring’) including Mfw1-D

[0104] SEQ ID NO 18 is a partial sequence of chromosome 7D of wheat (Triticum aestivum, variety ‘Chinese Spring’) including Mfw2-D

[0105] SEQ ID NO 19 is the DNA sequence to be inserted in Example 2 below.

[0106] SEQ ID NO 30 is the amino-acid sequence for which Mfw3-A codes.

[0107] SEQ ID NO 31 is the amino-acid sequence for which Mfw3-B codes.

[0108] SEQ ID NO 32 is the amino-acid sequence for which Mfw3-D codes.

[0109] SEQ ID NO 33 is the amino-acid sequence for which Mfw5-A codes.

[0110] SEQ ID NO 34 is the amino-acid sequence for which Mfw5-B codes.

[0111] SEQ ID NO 35 is the amino-acid sequence for which Mfw5-D codes.

[0112] SEQ ID NO 36 is the DNA coding sequence (from start-codon to stop-codon inclusive) of Mfw3-A from wheat (Triticum aestivum, variety ‘Fielder’).

[0113] SEQ ID NO 37 is the DNA coding sequence (from start-codon to stop-codon inclusive) of Mfw3-B from wheat (Triticum aestivum, variety ‘Fielder’).

[0114] SEQ ID NO 38 is the DNA coding sequence (from start-codon to stop-codon inclusive) of Mfw3-D from wheat (Triticum aestivum, variety ‘Fielder’).

[0115] SEQ ID NO 39 is the DNA coding sequence (from start-codon to stop-codon inclusive) of Mfw5-A from wheat (Triticum aestivum, variety ‘Fielder’).

[0116] SEQ ID NO 40 is the DNA coding sequence (from start-codon to stop-codon inclusive) of Mfw5-B from wheat (Triticum aestivum, variety ‘Fielder’).

[0117] SEQ ID NO 41 is the DNA coding sequence (from start-codon to stop-codon inclusive) of Mfw5-D from wheat (Triticum aestivum, variety ‘Fielder’).

[0118] SEQ ID NO 42 is a partial sequence of chromosome 6A of wheat (Triticum aestivum, variety ‘Chinese Spring’) including Mfw3-A.

[0119] SEQ ID NO 43 is a partial sequence of chromosome 6B of wheat (Triticum aestivum, variety ‘Chinese Spring’) including Mfw3-B.

[0120] SEQ ID NO 44 is a partial sequence of chromosome 6D of wheat (Triticum aestivum, variety ‘Chinese Spring’) including Mfw3-D.

[0121] SEQ ID NO 45 is a partial sequence of chromosome 2A of wheat (Triticum aestivum, variety ‘Chinese Spring’) including Mfw5-A.

[0122] SEQ ID NO 46 is a partial sequence of chromosome 2B of wheat (Triticum aestivum, variety ‘Chinese Spring’) including Mfw5-B.

[0123] SEQ ID NO 47 is a partial sequence of chromosome 2D of wheat (Triticum aestivum, variety ‘Chinese Spring’) including Mfw5-D.

[0124] SEQ ID NO 48 is the DNA sequence to be inserted in Example 6.

[0125] SEQ ID NO 60 is the amino-acid sequence for which Mfw4-A codes.

[0126] SEQ ID NO 61 is the DNA coding sequence (from start-codon to stop-codon inclusive) of Mfw4-A from wheat (Triticum aestivum, variety ‘Fielder’).

[0127] SEQ ID NO 62 is a partial sequence of the wheat (Triticum aestivum, variety ‘Chinese Spring’) genomic sequence including Mfw4-A.

[0128] SEQ ID NO 63 is the amino-acid sequence for which Mfw4-B codes.

[0129] SEQ ID NO 64 is the DNA coding sequence (from start-codon to stop-codon inclusive) of Mfw4-B from wheat (Triticum aestivum, variety ‘Fielder’).

[0130] SEQ ID NO 65 is a partial sequence of the wheat (Triticum aestivum, variety ‘Chinese Spring’) genomic sequence including Mfw4-B.

[0131] SEQ ID NO 66 is the amino-acid sequence for which Mfw4-D codes.

[0132] SEQ ID NO 67 is the DNA coding sequence (from start-codon to stop-codon inclusive) of Mfw4-D from wheat (Triticum aestivum, variety ‘Fielder’).

[0133] SEQ ID NO 68 is a partial sequence of the wheat (Triticum aestivum, variety ‘Chinese Spring’) genomic sequence including Mfw4-D.

[0134] SEQ ID NO 69 is the amino-acid sequence for which Mfw6-A codes.

[0135] SEQ ID NO 70 is the DNA coding sequence (from start-codon to stop-codon inclusive) of Mfw6-A from wheat (Triticum aestivum, variety ‘Fielder’).

[0136] SEQ ID NO 71 is a partial sequence of the wheat (Triticum aestivum, variety ‘Chinese Spring’) genomic sequence including Mfw6-A.

[0137] SEQ ID NO 72 is the amino-acid sequence for which Mfw6-D codes.

[0138] SEQ ID NO 73 is the DNA coding sequence (from start-codon to stop-codon inclusive) of Mfw6-D from wheat (Triticum aestivum, variety ‘Fielder’).

[0139] SEQ ID NO 74 is a partial sequence of the wheat (Triticum aestivum, variety ‘Chinese Spring’) genomic sequence including Mfw6-D.

[0140] SEQ ID NO 75 is the amino-acid sequence for which Mfw7-A codes.

[0141] SEQ ID NO 76 is the DNA coding sequence (from start-codon to stop-codon inclusive) of Mfw7-A from wheat (Triticum aestivum, variety ‘Fielder’).

[0142] SEQ ID NO 77 is a partial sequence of the wheat (Triticum aestivum, variety ‘Chinese Spring’) genomic sequence including Mfw7-A.

[0143] SEQ ID NO 78 is the amino-acid sequence for which Mfw7-B codes.

[0144] SEQ ID NO 79 is the DNA coding sequence (from start-codon to stop-codon inclusive) of Mfw7-B from wheat (Triticum aestivum, variety ‘Fielder’).

[0145] SEQ ID NO 80 is a partial sequence of the wheat (Triticum aestivum, variety ‘Chinese Spring’) genomic sequence including Mfw7-B.

[0146] SEQ ID NO 81 is the amino-acid sequence for which Mfw7-D codes.

[0147] SEQ ID NO 82 is the DNA coding sequence (from start-codon to stop-codon inclusive) of Mfw7-D from wheat (Triticum aestivum, variety ‘Fielder’).

[0148] SEQ ID NO 83 is a partial sequence of the wheat (Triticum aestivum, variety ‘Chinese Spring’) genomic sequence including Mfw7-D.

[0149] SEQ ID NO 84 is the amino-acid sequence for which Mfw8-A codes.

[0150] SEQ ID NO 85 is the DNA coding sequence (from start-codon to stop-codon inclusive) of Mfw8-A from wheat (Triticum aestivum, variety ‘Fielder’).

[0151] SEQ ID NO 86 is a partial sequence of the wheat (Triticum aestivum, variety ‘Chinese Spring’) genomic sequence including Mfw8-A.

[0152] SEQ ID NO 87 is the amino-acid sequence for which Mfw8-B codes.

[0153] SEQ ID NO 88 is the DNA coding sequence (from start-codon to stop-codon inclusive) of Mfw8-B from wheat (Triticum aestivum, variety ‘Fielder’).

[0154] SEQ ID NO 89 is a partial sequence of the wheat (Triticum aestivum, variety ‘Chinese Spring’) genomic sequence including Mfw8-B.

[0155] SEQ ID NO 90 is the amino-acid sequence for which Mfw8-D codes.

[0156] SEQ ID NO 91 is the DNA coding sequence (from start-codon to stop-codon inclusive) of Mfw8-D from wheat (Triticum aestivum, variety ‘Fielder’).

[0157] SEQ ID NO 92 is a partial sequence of the wheat (Triticum aestivum, variety ‘Chinese Spring’) genomic sequence including Mfw8-D.

[0158] SEQ ID NO 93 is the amino-acid sequence for which Mfw9-A codes.

[0159] SEQ ID NO 94 is the DNA coding sequence (from start-codon to stop-codon inclusive) of Mfw9-A from wheat (Triticum aestivum, variety ‘Fielder’).

[0160] SEQ ID NO 95 is a partial sequence of the wheat (Triticum aestivum, variety ‘Chinese Spring’) genomic sequence including Mfw9-A.

[0161] SEQ ID NO 96 is the amino-acid sequence for which Mfw9-B codes.

[0162] SEQ ID NO 97 is the DNA coding sequence (from start-codon to stop-codon inclusive) of Mfw9-B from wheat (Triticum aestivum, variety ‘Fielder’).

[0163] SEQ ID NO 98 is a partial sequence of the wheat (Triticum aestivum, variety ‘Chinese Spring’) genomic sequence including Mfw9-B.

[0164] SEQ ID NO 99 is the amino-acid sequence for which Mfw9-D codes.

[0165] SEQ ID NO 100 is the DNA coding sequence (from start-codon to stop-codon inclusive) of Mfw9-D from wheat (Triticum aestivum, variety ‘Fielder’).

[0166] SEQ ID NO 101 is a partial sequence of the wheat (Triticum aestivum, variety ‘Chinese Spring’) genomic sequence including Mfw9-D.

[0167] SEQ ID NO 102 is the amino-acid sequence for which Mfw10-A codes.

[0168] SEQ ID NO 103 is the DNA coding sequence (from start-codon to stop-codon inclusive) of Mfw10-A from wheat (Triticum aestivum, variety ‘Fielder’).

[0169] SEQ ID NO 104 is a partial sequence of the wheat (Triticum aestivum, variety ‘Chinese Spring’) genomic sequence including Mfw10-A.

[0170] SEQ ID NO 105 is the amino-acid sequence for which Mfw10-B codes.

[0171] SEQ ID NO 106 is the DNA coding sequence (from start-codon to stop-codon inclusive) of Mfw10-B from wheat (Triticum aestivum, variety ‘Fielder’).

[0172] SEQ ID NO 107 is a partial sequence of the wheat (Triticum aestivum, variety ‘Chinese Spring’) genomic sequence including Mfw11-U.

[0173] SEQ ID NO 108 is the amino-acid sequence for which Mfw11-U codes.

[0174] SEQ ID NO 109 is the DNA coding sequence (from start-codon to stop-codon inclusive) of Mfw11-U from wheat (Triticum aestivum, variety ‘Fielder’).

[0175] SEQ ID NO 110 is a partial sequence of the wheat (Triticum aestivum, variety ‘Chinese Spring’) genomic sequence including Mfw11-U.

[0176] SEQ ID NO 111 is the amino-acid sequence for which Mfw12-A codes.

[0177] SEQ ID NO 112 is the DNA coding sequence (from start-codon to stop-codon inclusive) of Mfw12-A from wheat (Triticum aestivum, variety ‘Fielder’).

[0178] SEQ ID NO 113 is a partial sequence of the wheat (Triticum aestivum, variety ‘Chinese Spring’) genomic sequence including Mfw12-A.

[0179] SEQ ID NO 114 is the amino-acid sequence for which Mfw12-B codes.

[0180] SEQ ID NO 115 is the DNA coding sequence (from start-codon to stop-codon inclusive) of Mfw12-B from wheat (Triticum aestivum, variety ‘Fielder’).

[0181] SEQ ID NO 116 is a partial sequence of the wheat (Triticum aestivum, variety ‘Chinese Spring’) genomic sequence including Mfw12-B.

[0182] SEQ ID NO 117 is the amino-acid sequence for which Mfw12-D codes.

[0183] SEQ ID NO 118 is the DNA coding sequence (from start-codon to stop-codon inclusive) of Mfw12-D from wheat (Triticum aestivum, variety ‘Fielder’).

[0184] SEQ ID NO 119 is a partial sequence of the wheat (Triticum aestivum, variety ‘Chinese Spring’) genomic sequence including Mfw12-D.

[0185] SEQ ID NO 120 is the amino-acid sequence for which Mfw13-A codes.

[0186] SEQ ID NO 121 is the DNA coding sequence (from start-codon to stop-codon inclusive) of Mfw13-A from wheat (Triticum aestivum, variety ‘Fielder’).

[0187] SEQ ID NO 122 is a partial sequence of the wheat (Triticum aestivum, variety ‘Chinese Spring’) genomic sequence including Mfw13-A.

[0188] SEQ ID NO 123 is the amino-acid sequence for which Mfw13-B codes.

[0189] SEQ ID NO 124 is the DNA coding sequence (from start-codon to stop-codon inclusive) of Mfw13-B from wheat (Triticum aestivum, variety ‘Fielder’).

[0190] SEQ ID NO 125 is a partial sequence of the wheat (Triticum aestivum, variety ‘Chinese Spring’) genomic sequence including Mfw13-D.

[0191] SEQ ID NO 126 is the amino-acid sequence for which Mfw13-B codes.

[0192] SEQ ID NO 127 is the DNA coding sequence (from start-codon to stop-codon inclusive) of Mfw13-D from wheat (Triticum aestivum, variety ‘Fielder’).

[0193] SEQ ID NO 128 is a partial sequence of the wheat (Triticum aestivum, variety ‘Chinese Spring’) genomic sequence including Mfw13-D.

[0194] All samples of genetic resources used in the Examples were obtained in the UK, from stock reproduced in the UK. The wheat variety ‘Fielder’ was originally bred in the USA.

[0195] Further description of SEQ ID NOs 13-18

[0196] SEQ ID NO 13 is a partial sequence of that part of chromosome 7A of wheat (Triticum aestivum, variety ‘Chinese Spring’) that, from the start codon starting at 6072 bp to the end of the TAA stop codon at 8122 bp, includes the DNA coding sequence for Mfw1-A as well as flanking sequences upstream of the start codon and downstream of the stop codon. These flanking sequences may be expected to include regulatory sequences, such as, in the upstream flanking sequence, the promoter.

[0197] SEQ ID NO 14 is a partial sequence of that part of chromosome 7B of wheat (Triticum aestivum, variety ‘Chinese Spring’) that, from the start codon starting at 2076 bp to the end of the TAA stop codon at 3844 bp, includes the DNA coding sequence for Mfw2-A as well as flanking sequences upstream of the start codon and downstream of the stop codon. These flanking sequences may be expected to include regulatory sequences, such as, in the upstream flanking sequence, the promoter.

[0198] SEQ ID NO 15 is a partial sequence of that part of chromosome 7D of wheat (Triticum aestivum, variety ‘Chinese Spring’) that, from the start codon starting at 7957 bp to the end of the TAA stop codon at 9960 bp, includes the DNA coding sequence for Mfw1-B as well as flanking sequences upstream of the start codon and downstream of the stop codon. These flanking sequences may be expected to include regulatory sequences, such as, in the upstream flanking sequence, the promoter.

[0199] SEQ ID NO 16 is a partial sequence of that part of chromosome 7A of wheat (Triticum aestivum, variety ‘Chinese Spring’) that, from the start codon starting at 2949 bp to the end of the TGA stop codon at 16953 bp, includes the DNA coding sequence for Mfw2-B as well as flanking sequences upstream of the start codon and downstream of the stop codon. These flanking sequences may be expected to include regulatory sequences, such as, in the upstream flanking sequence, the promoter.

[0200] SEQ ID NO 17 is a partial sequence of that part of chromosome 7B of wheat (Triticum aestivum, variety ‘Chinese Spring’) that, from the start codon starting at 249 bp to the end of the TGA stop codon at 17681 bp, includes the DNA coding sequence for Mfw1-D as well as flanking sequences upstream of the start codon and downstream of the stop codon. These flanking sequences may be expected to include regulatory sequences, such as, in the upstream flanking sequence, the promoter.

[0201] SEQ ID NO 18 is a partial sequence of that part of chromosome 7D of wheat (Triticum aestivum, variety ‘Chinese Spring’) that, from the start codon starting at 1255 bp to the end of the TGA stop codon at 18448 bp, includes the DNA coding sequence for Mfw2-D as well as flanking sequences upstream of the start codon and downstream of the stop codon. These flanking sequences may be expected to include regulatory sequences, such as, in the upstream flanking sequence, the promoter.

[0202] SEQ ID Nos 13-18 are taken from the public literature referred to above.

[0203] Further description of SEQ ID NOs

[0204] SEQ ID NO 42 is a partial sequence of that part of chromosome 6A of wheat (Triticum aestivum, variety ‘Chinese Spring’) that, from the start codon starting at 2130 bp to the end of the TGA stop codon at 4398 bp, includes the DNA coding sequence for Mfw3-A as well as flanking sequences upstream of the start codon and downstream of the stop codon. These flanking sequences may be expected to include regulatory sequences, such as, in the upstream flanking sequence, the promoter.

[0205] SEQ ID NO 43 is a partial sequence of that part of chromosome 6B of wheat (Triticum aestivum, variety ‘Chinese Spring’) that, from the start codon starting at 1884 bp to the end of the TGA stop codon at 4144 bp, includes the DNA coding sequence for Mfw3-B as well as flanking sequences upstream of the start codon and downstream of the stop codon. These flanking sequences may be expected to include regulatory sequences, such as, in the upstream flanking sequence, the promoter.

[0206] SEQ ID NO 44 is a partial sequence of that part of chromosome 6D of wheat (Triticum aestivum, variety ‘Chinese Spring’) that, from the start codon starting at 2078 bp to the end of the TGA stop codon at 4269 bp, includes the DNA coding sequence for Mfw3-D as well as flanking sequences upstream of the start codon and downstream of the stop codon. These flanking sequences may be expected to include regulatory sequences, such as, in the upstream flanking sequence, the promoter.

[0207] SEQ ID NO 45 is a partial sequence of that part of chromosome 2A of wheat (Triticum aestivum, variety ‘Chinese Spring’) that, from the start codon starting at 1395 bp to the end of the TGA stop codon at 3650 bp, includes the DNA coding sequence for Mfw5-A as well as flanking sequences upstream of the start codon and downstream of the stop codon. These flanking sequences may be expected to include regulatory sequences, such as, in the upstream flanking sequence, the promoter.

[0208] SEQ ID NO 46 is a partial sequence of that part of chromosome 2B of wheat (Triticum aestivum, variety ‘Chinese Spring’) that, from the start codon starting at 2360 bp to the end of the TGA stop codon at 4734 bp, includes the DNA coding sequence for Mfw5-B as well as flanking sequences upstream of the start codon and downstream of the stop codon. These flanking sequences may be expected to include regulatory sequences, such as, in the upstream flanking sequence, the promoter.

[0209] SEQ ID NO 47 is a partial sequence of that part of chromosome 2D of wheat (Triticum aestivum, variety ‘Chinese Spring’) that, from the start codon starting at 1501 bp to the end of the TGA stop codon at 3579 bp, includes the DNA coding sequence for Mfw5-D as well as flanking sequences upstream of the start codon and downstream of the stop codon. These flanking sequences may be expected to include regulatory sequences, such as, in the upstream flanking sequence, the promoter.

[0210] SEQ ID NO 62 is a partial sequence of that part of the genomic sequence of wheat (Triticum aestivum, variety ‘Chinese Spring’) that, from the start codon starting at 1374 bp to the end of the TGA stop codon at 4938 bp, includes the DNA coding sequence for Mfw4-A as well as flanking sequences upstream of the start codon and downstream of the stop codon. These flanking sequences may be expected to include regulatory sequences, such as, in the upstream flanking sequence, the promoter.

[0211] SEQ ID NO 65 is a partial sequence of that part of the genomic sequence of wheat (Triticum aestivum, variety ‘Chinese Spring’) that, from the start codon starting at 1309 bp to the end of the TGA stop codon at 4637 bp, includes the DNA coding sequence for Mfw4-B as well as flanking sequences upstream of the start codon and downstream of the stop codon. These flanking sequences may be expected to include regulatory sequences, such as, in the upstream flanking sequence, the promoter.

[0212] SEQ ID NO 68 is a partial sequence of that part of the genomic sequence of wheat (Triticum aestivum, variety ‘Chinese Spring’) that, from the start codon starting at 1309 bp to the end of the TGA stop codon at 4637 bp, includes the DNA coding sequence for Mfw4-D as well as flanking sequences upstream of the start codon and downstream of the stop codon. These flanking sequences may be expected to include regulatory sequences, such as, in the upstream flanking sequence, the promoter.

[0213] SEQ ID NO 71 is a partial sequence of that part of the genomic sequence of wheat (Triticum aestivum, variety ‘Chinese Spring’) that, from the start codon starting at 1605 bp to the end of the TGA stop codon at 3022 bp, includes the DNA coding sequence for Mfw6-A as well as flanking sequences upstream of the start codon and downstream of the stop codon. These flanking sequences may be expected to include regulatory sequences, such as, in the upstream flanking sequence, the promoter.

[0214] SEQ ID NO 74 is a partial sequence of that part of the genomic sequence of wheat (Triticum aestivum, variety ‘Chinese Spring’) that, from the start codon starting at 1560 bp to the end of the TGA stop codon at 2980 bp, includes the DNA coding sequence for Mfw6-D as well as flanking sequences upstream of the start codon and downstream of the stop codon. These flanking sequences may be expected to include regulatory sequences, such as, in the upstream flanking sequence, the promoter.

[0215] SEQ ID NO 77 is a partial sequence of that part of the genomic sequence of wheat (Triticum aestivum, variety ‘Chinese Spring’) that, from the start codon starting at 1318 bp to the end of the TGA stop codon at 3470 bp, includes the DNA coding sequence for Mfw7-A as well as flanking sequences upstream of the start codon and downstream of the stop codon. These flanking sequences may be expected to include regulatory sequences, such as, in the upstream flanking sequence, the promoter.

[0216] SEQ ID NO 80 is a partial sequence of that part of the genomic sequence of wheat (Triticum aestivum, variety ‘Chinese Spring’) that, from the start codon starting at 1229 bp to the end of the TGA stop codon at 3369 bp, includes the DNA coding sequence for Mfw7-B as well as flanking sequences upstream of the start codon and downstream of the stop codon. These flanking sequences may be expected to include regulatory sequences, such as, in the upstream flanking sequence, the promoter.

[0217] SEQ ID NO 83 is a partial sequence of that part of the genomic sequence of wheat (Triticum aestivum, variety ‘Chinese Spring’) that, from the start codon starting at 1413 bp to the end of the TGA stop codon at 3588 bp, includes the DNA coding sequence for Mfw7-D as well as flanking sequences upstream of the start codon and downstream of the stop codon. These flanking sequences may be expected to include regulatory sequences, such as, in the upstream flanking sequence, the promoter.

[0218] SEQ ID NO 86 is a partial sequence of that part of the genomic sequence of wheat (Triticum aestivum, variety ‘Chinese Spring’) that, from the start codon starting at 1340 bp to the end of the TGA stop codon at 3407 bp, includes the DNA coding sequence for Mfw8-A as well as flanking sequences upstream of the start codon and downstream of the stop codon. These flanking sequences may be expected to include regulatory sequences, such as, in the upstream flanking sequence, the promoter.

[0219] SEQ ID NO 87 is a partial sequence of that part of the genomic sequence of wheat (Triticum aestivum, variety ‘Chinese Spring’) that, from the start codon starting at 1349 bp to the end of the TGA stop codon at 3422 bp, includes the DNA coding sequence for Mfw8-B as well as flanking sequences upstream of the start codon and downstream of the stop codon. These flanking sequences may be expected to include regulatory sequences, such as, in the upstream flanking sequence, the promoter.

[0220] SEQ ID NO 92 is a partial sequence of that part of the genomic sequence of wheat (Triticum aestivum, variety ‘Chinese Spring’) that, from the start codon starting at 1331 bp to the end of the TGA stop codon at 3401 bp, includes the DNA coding sequence for Mfw8-D as well as flanking sequences upstream of the start codon and downstream of the stop codon. These flanking sequences may be expected to include regulatory sequences, such as, in the upstream flanking sequence, the promoter.

[0221] SEQ ID NO 95 is a partial sequence of that part of the genomic sequence of wheat (Triticum aestivum, variety ‘Chinese Spring’) that, from the start codon starting at 1248 bp to the end of the TGA stop codon at 2849 bp, includes the DNA coding sequence for Mfw9-A as well as flanking sequences upstream of the start codon and downstream of the stop codon. These flanking sequences may be expected to include regulatory sequences, such as, in the upstream flanking sequence, the promoter.

[0222] SEQ ID NO 98 is a partial sequence of that part of the genomic sequence of wheat (Triticum aestivum, variety ‘Chinese Spring’) that, from the start codon starting at 393 bp to the end of the TGA stop codon at 32502 bp, includes the DNA coding sequence for Mfw9-B as well as flanking sequences upstream of the start codon and downstream of the stop codon. These flanking sequences may be expected to include regulatory sequences, such as, in the upstream flanking sequence, the promoter.

[0223] SEQ ID NO 101 is a partial sequence of that part of the genomic sequence of wheat (Triticum aestivum, variety ‘Chinese Spring’) that, from the start codon starting at 1273 bp to the end of the TGA stop codon at 2831 bp, includes the DNA coding sequence for Mfw9-D as well as flanking sequences upstream of the start codon and downstream of the stop codon. These flanking sequences may be expected to include regulatory sequences, such as, in the upstream flanking sequence, the promoter.

[0224] SEQ ID NO 104 is a partial sequence of that part of the genomic sequence of wheat (Triticum aestivum, variety ‘Chinese Spring’) that, from the start codon starting at 1398 bp to the end of the TGA stop codon at 3217 bp, includes the DNA coding sequence for Mfw10-A as well as flanking sequences upstream of the start codon and downstream of the stop codon. These flanking sequences may be expected to include regulatory sequences, such as, in the upstream flanking sequence, the promoter.

[0225] SEQ ID NO 107 is a partial sequence of that part of the genomic sequence of wheat (Triticum aestivum, variety ‘Chinese Spring’) that, from the start codon starting at 1407 bp to the end of the TGA stop codon at 3217 bp, includes the DNA coding sequence for Mfw10-B as well as flanking sequences upstream of the start codon and downstream of the stop codon. These flanking sequences may be expected to include regulatory sequences, such as, in the upstream flanking sequence, the promoter.

[0226] SEQ ID NO 110 is a partial sequence of that part of the genomic sequence of wheat (Triticum aestivum, variety ‘Chinese Spring’) that, from the start codon starting at 1553 bp to the end of the TGA stop codon at 2940 bp, includes the DNA coding sequence for Mfw11-U as well as flanking sequences upstream of the start codon and downstream of the stop codon. These flanking sequences may be expected to include regulatory sequences, such as, in the upstream flanking sequence, the promoter.

[0227] SEQ ID NO 113 is a partial sequence of that part of the genomic sequence of wheat (Triticum aestivum, variety ‘Chinese Spring’) that, from the start codon starting at 1309 bp to the end of the TGA stop codon at 3246 bp, includes the DNA coding sequence for Mfw12-A as well as flanking sequences upstream of the start codon and downstream of the stop codon. These flanking sequences may be expected to include regulatory sequences, such as, in the upstream flanking sequence, the promoter.

[0228] SEQ ID NO 116 is a partial sequence of that part of the genomic sequence of wheat (Triticum aestivum, variety ‘Chinese Spring’) that, from the start codon starting at 1281 bp to the end of the TGA stop codon at 3169 bp, includes the DNA coding sequence for Mfw12-B as well as flanking sequences upstream of the start codon and downstream of the stop codon. These flanking sequences may be expected to include regulatory sequences, such as, in the upstream flanking sequence, the promoter.

[0229] SEQ ID NO 119 is a partial sequence of that part of the genomic sequence of wheat (Triticum aestivum, variety ‘Chinese Spring’) that, from the start codon starting at 1300 bp to the end of the TGA stop codon at 3086 bp, includes the DNA coding sequence for Mfw12-D as well as flanking sequences upstream of the start codon and downstream of the stop codon. These flanking sequences may be expected to include regulatory sequences, such as, in the upstream flanking sequence, the promoter.

[0230] SEQ ID NO 122 is a partial sequence of that part of the genomic sequence of wheat (Triticum aestivum, variety ‘Chinese Spring’) that, from the start codon starting at 1308 bp to the end of the TGA stop codon at 3251 bp, includes the DNA coding sequence for Mfw13-A as well as flanking sequences upstream of the start codon and downstream of the stop codon. These flanking sequences may be expected to include regulatory sequences, such as, in the upstream flanking sequence, the promoter.

[0231] SEQ ID NO 125 is a partial sequence of that part of the genomic sequence of wheat (Triticum aestivum, variety ‘Chinese Spring’) that, from the start codon starting at 1259 bp to the end of the TGA stop codon at 3233 bp, includes the DNA coding sequence for Mfw13-B as well as flanking sequences upstream of the start codon and downstream of the stop codon. These flanking sequences may be expected to include regulatory sequences, such as, in the upstream flanking sequence, the promoter.

[0232] SEQ ID NO 128 is a partial sequence of that part of the genomic sequence of wheat (Triticum aestivum, variety ‘Chinese Spring’) that, from the start codon starting at 1446 bp to the end of the TGA stop codon at 3418 bp, includes the DNA coding sequence for Mfw13-D as well as flanking sequences upstream of the start codon and downstream of the stop codon. These flanking sequences may be expected to include regulatory sequences, such as, in the upstream flanking sequence, the promoter.

[0233] In some embodiments of any of the aspects, Mfw1, Mfw2, Mfw3, and/or Mfw5 genes can be deactivated in wheat plants by utilizing a CRISPR/Cas system to introduce deactivating mutations at these loci. For example, Mfw1 and Mfw2 genes can be targeted with four guide RNAs for each of the three sets of homoeologues. The target sequences in these genes can be identified using the publicly available program DREG (available on the world wide web at emboss.sourceforge.net/apps/cvs/emboss/apps/dreg.html) to find sequences that match either ANNNNNNNNNNNNNNNNNNNNGG or GNNNNNNNNNNNNNNNNNNNNNGG in both directions of the Fielder genomic sequence.

[0234] As an illustrative example, the guides can be selected from the results based on the following criteria: that the target sequence is conserved in all three homoeologues, that it is (at least partially) in an exon of Mfw1 or Mfw2 genes, that it has a restriction enzyme site near the site of the protospacer associated motif (PAM) but in the sequence of the guide RNA and finally, prioritizing guides near the start of the coding sequences of each gene.

[0235] An additional consideration can be to select sequences with either AN20GG and GN20GG as this stabilizes the construct for transformation in the plant. Exemplary guide sequences are depicted within the context of SEQ ID NOs 20-21 below and are individually identified, in order, as SEQ ID NOs 22-29. Guide sequence expression can be driven by individual and/or shared promoters. Exemplary promoters include OsU3, TaU3, TaU6 and OsU6 promoters

[0236] Guide constructs, expressing one or more sgRNA sequences can be cloned into a vector suitable for expressing the sgRNAs in wheat, e.g., a binary vector containing a wheat-optimized Cas9 enzyme driven by the rice actin promoter. Vectors can be introduced into wheat by any means known in the art, e.g. by Agrobacterium. Alternatively, the sgRNAs can be expressed in vitro and introduced into wheat cells by, e.g., microinjection.

[0237] Plants can be screened for deactivating modifications, e.g., utilizing a PCR based method where the PCR product is digested with an appropriate enzyme previously identified to cut the DNA at a site near the PAM. PCR products which are not cut therefore contain a mutation induced by the CRISPR construct.

Sequence for Mfw1 guides (guide targeting sequences shown in
bold)
(SEQ ID NO: 20)
CAAATAATGATTTTATTTTGACTGATAGTGACCTGTTCGTTGCAACAAATTGATG
AGCAATGCTTTTTTATAATGCCAAGTTTGTACAAAAAAGCAGGCTTTAACCGCGG
TATACAAGGAATCTTTAAACATACGAACAGATCACTTAAAGTTCTTCTGAAGCAA
CTTAAAGTTATCAGGCATGCATGGATCTTGGAGGAATCAGATGTGCAGTCAGGG
ACCATAGCACAAGACAGGCGTCTTCTACTGGTGCTACCAGCAAATGCTGGAAGC
CGGGAACACTGGGTACGTTGGAAACCACGTGATGTGAAGAAGTAAGATAAACTG
TAGGAGAAAAGCATTTCGTAGTGGGCCATGAAGCCTTTCAGGACATGTATTGCA
GTATGGGCCGGCCCATTACGCAATTGGACGACAACAAAGACTAGTATTAGTACC
ACCTCGGCTATCCACATAGATCAAAGCTGATTTAAAAGAGTTGTGCAGATGATCC
GTGGCATCGGGAATGTCATCTCCTTGTTTTAGAGCTAGAAATAGCAAGTTAAA
ATAAGGCTAGTCCGTTATCAACTTGAAAAAGTGGCACCGAGTCGGTGCTTTTTTT
TATAACTTAAGCCGCGGGTATACTTAATTAAATTGGATGATCTGATAATTAACCC
GGGGACCAAGCCCGTTATTCTGACAGTTCTGGTGCTCAACACATTTATATTTATC
AAGGAGCACATTGTTACTCACTGCTAGGAGGGAATCGAACTAGGAATATTGATC
AGAGGAACTACGAGAGAGCTGAAGATAACTGCCCTCTAGCTCTCACTGATCTGG
GTCGCATAGTGAGATGCAGCCCACGTGAGTTCAGCAACGGTCTAGCGCTGGGCT
TTTAGGCCCGCATGATCGGGCTTTTGTCGGGTGGTCGACGTGTTCACGATTGGGG
AGAGCAACGCAGCAGTTCCTCTTAGTTTAGTCCCACCTCGCCTGTCCAGCAGAGT
TCTGACCGGTTTATAAACTCGCTTGCTGCATCAGACTTGTACGTACCATGATGG
TGAGGTTTTAGAGCTAGAAATAGCAAGTTAAAATAAGGCTAGTCCGTTATCAAC
TTGAAAAAGTGGCACCGAGTCGGTGCTTTTTTTCCGCGGCACGTCTCGAGCCCGG
GTTAATTAAATTGGATGATGACTCTAGATAACGCAGAAGATTAATTAACCCGGG
GACCAAGCCCGTTATTCTGACAGTTCTGGTGCTCAACACATTTATATTTATCAAG
GAGCACATTGTTACTCACTGCTAGGAGGGAATCGAACTAGGAATATTGATCAGA
GGAACTACGAGAGAGCTGAAGATAACTGCCCTCTAGCTCTCACTGATCTGGGTC
GCATAGTGAGATGCAGCCCACGTGAGTTCAGCAACGGTCTAGCGCTGGGCTTTTA
GGCCCGCATGATCGGGCTTTTGTCGGGTGGTCGACGTGTTCACGATTGGGGAGAG
CAACGCAGCAGTTCCTCTTAGTTTAGTCCCACCTCGCCTGTCCAGCAGAGTTCTG
ACCGGTTTATAAACTCGCTTGCTGCATCAGACTTGATCATCAAGGCCAAGGACG
GTTTTAGAGCTAGAAATAGCAAGTTAAAATAAGGCTAGTCCGTTATCAACTTGAA
AAAGTGGCACCGAGTCGGTGCTTTTTTTCCGCGGCACGTCTCGAGCCCGGGTTAA
TTAAATTGGATGATGACTCTAGATAACGCAGGATCCACTAGTAACGGCCGCCAG
TGTGCTGGAATTGCCCTTGGATCATGAACCAACGGCCTGGCTGTATTTGGTGGTT
GTGTAGGGAGATGGGGAGAAGAAAAGCCCGATTCTCTTCGCTGTGATGGGCTGG
ATGCATGCGGGGGAGCGGGAGGCCCAAGTACGTGCACGGTGAGCGGCCCACAG
GGCGAGTGTGAGCGCGAGAGGCGGGAGGAACAGTTTAGTACCACATTGCCCAGC
TAACTCGAACGCGACCAACTTATAAACCCGCGCGCTGTCGCTTGTGTGGGGGAT
GGGGGCTTACGTAGTTTTAGAGCTAGAAATAGCAAGTTAAAATAAGGCTAGTC
CGTTATCAACTTGAAAAAGTGGCACCGAGTCGGTGCTTTTTTTGTCCCTTCGAAG
GGCAATTCTGCAGATATCCATCACACTGGCGGCCGCTCGAGGTCGAGGGTATCG
ATAAGCTTGAATTCGACCCAGCTTTCTTGTACAAAGTTGGCATTATAAAAAATAA
TTGCTCATCAATTTGTTGCAACGAACAGGTCACTATCAGTCAAAATAAAATCATT
ATTTG
SEQ ID NO: 22
TCGGGAATGTCATCTCCTT
SEQ ID NO: 23
TACGTACCATGATGGTGAG
SEQ ID NO: 24
ATCATCAAGGCCAAGGACG
SEQ ID NO: 25
GGGGATGGGGGCTTACGTA
Sequence for Mfw2 guides (guide targeting sequences shown
in bold)
(SEQ ID NO 21)
CAAATAATGATTTTATTTTGACTGATAGTGACCTGTTCGTTGCAACAAATTGATG
AGCAATGCTTTTTTATAATGCCAAGTTTGTACAAAAAAGCAGGCTTTAACCGCGG
TATACAAGGAATCTTTAAACATACGAACAGATCACTTAAAGTTCTTCTGAAGCAA
CTTAAAGTTATCAGGCATGCATGGATCTTGGAGGAATCAGATGTGCAGTCAGGG
ACCATAGCACAAGACAGGCGTCTTCTACTGGTGCTACCAGCAAATGCTGGAAGC
CGGGAACACTGGGTACGTTGGAAACCACGTGATGTGAAGAAGTAAGATAAACTG
TAGGAGAAAAGCATTTCGTAGTGGGCCATGAAGCCTTTCAGGACATGTATTGCA
GTATGGGCCGGCCCATTACGCAATTGGACGACAACAAAGACTAGTATTAGTACC
ACCTCGGCTATCCACATAGATCAAAGCTGATTTAAAAGAGTTGTGCAGATGATCC
GTGGCACACCTGATTGTTTCTCACTGTTTTAGAGCTAGAAATAGCAAGTTAAAA
TAAGGCTAGTCCGTTATCAACTTGAAAAAGTGGCACCGAGTCGGTGCTTTTTTTT
ATAACTTAAGCCGCGGGTATACTTAATTAAATTGGATGATCTGACTAGATACCGG
TCTCGAGTTAACATGAATCCAAACCACACGGAGTTCAAATTCCCACAGATTAAG
GCTCGTCCGTCGCACAAGGTAATGTGTGAATATTATATCTGTCGTGCAAAATTGC
CTGGCCTGCACAATTGCTGTTATAGTTGGCGGCAGGGAGAGTTTTAACATTGACT
AGCGTGCTGATAATTTGTGAGAAATAATAATTGACAAGTAGATACTGACATTTGA
GAAGAGCTTCTGAACTGTTATTAGTAACAAAAATGGAAAGCTGATGCACGGAAA
AAGGAAAGAAAAAGCCATACTTTTTTTTAGGTAGGAAAAGAAAAAGCCATACGA
GACTGATGTCTCTCAGATGGGCCGGGATCTGTCTATCTAGCAGGCAGCAGCCCTA
CCAACCTCACGGGCCAGCAATTACGAGTCCTTCTAAAACGTCCCGCCGAGGGCG
CGTGGCCGTGCTGTGCAGCAGCACGTCTAACATTAGTCCCACCTCGCCAGTTTAC
AGGGAGCAGAACCAGCTTATAAGCGGAGGCGCGGCACCAAGAAGCAACTTGCA
TCTAATGTGGCCGTTTTAGAGCTAGAAATAGCAAGTTAAAATAAGGCTAGTCCG
TTATCAACTTGAAAAAGTGGCACCGAGTCGGTGCCAACATTTTTTTTGTCCTTCTG
TTTTTTTAGTCAGTCTCTTTTTTCAGAAGTACAACATCTTTTTTTTGTCCTTCTGTT
TTTTTAGTCAGTCTTTTTTCAGAAGTACTCTATGTGATATCTTCGTTCTGGGAAAT
GTCTGTCTGTCTACAACCCATAATTATATTTGCAATCACACATCTAATATCTCTGT
GACAAGACAGCCGAACAACCTAGGTAAGATTAATTAACCCGGGGACCAAGCCCG
TTATTCTGACAGTTCTGGTGCTCAACACATTTATATTTATCAAGGAGCACATTGTT
ACTCACTGCTAGGAGGGAATCGAACTAGGAATATTGATCAGAGGAACTACGAGA
GAGCTGAAGATAACTGCCCTCTAGCTCTCACTGATCTGGGTCGCATAGTGAGATG
CAGCCCACGTGAGTTCAGCAACGGTCTAGCGCTGGGCTTTTAGGCCCGCATGATC
GGGCTTTTGTCGGGTGGTCGACGTGTTCACGATTGGGGAGAGCAACGCAGCAGT
TCCTCTTAGTTTAGTCCCACCTCGCCTGTCCAGCAGAGTTCTGACCGGTTTATAAA
CTCGCTTGCTGCATCAGACTTGGATGGCCAATGCGAGATGAGTTTTAGAGCTAG
AAATAGCAAGTTAAAATAAGGCTAGTCCGTTATCAACTTGAAAAAGTGGCACCG
AGTCGGTGCTTTTTTTCCGCGGCACGTCTCGAGCCCGGGTTAATTAAATTGGATG
ATGACTCTAGATAACGCAGGATCCACTAGTAACGGCCGCCAGTGTGCTGGAATT
GCCCTTGGATCATGAACCAACGGCCTGGCTGTATTTGGTGGTTGTGTAGGGAGAT
GGGGAGAAGAAAAGCCCGATTCTCTTCGCTGTGATGGGCTGGATGCATGCGGGG
GAGCGGGAGGCCCAAGTACGTGCACGGTGAGCGGCCCACAGGGCGAGTGTGAG
CGCGAGAGGCGGGAGGAACAGTTTAGTACCACATTGCCCAGCTAACTCGAACGC
GACCAACTTATAAACCCGCGCGCTGTCGCTTGTGTGATAGTAGTTAGTGCCGCG
TGTTTTAGAGCTAGAAATAGCAAGTTAAAATAAGGCTAGTCCGTTATCAACTTGA
AAAAGTGGCACCGAGTCGGTGCTTTTTTTGTCCCTTCGAAGGGCAATTCTGCAGA
TATCCATCACACTGGCGGCCGCTCGAGGTCGAGGGTATCGATAAGCTTGAATTCG
ACCCAGCTTTCTTGTACAAAGTTGGCATTATAAAAAATAATTGCTCATCAATTTG
TTGCAACGAACAGGTCACTATCAGTCAAAATAAAATCATTATTTG
SEQ ID NO: 26
CACCTGATTGTTTCTCACT
SEQ ID NO: 27
ACTTGCATCTAATGTGGCC
SEQ ID NO: 28
GATGGCCAATGCGAGATGA
SEQ ID NO: 29
ATAGTAGTTAGTGCCGCGT

[0238] Mfw3-A coding sequence (SEQ ID NO: 36), with the portion used for the Mfw-3/Mfw-5 hairpin described in Example 2 depicted in bold (SEQ ID NO: 54). Exemplary guide targeting sequences (SEQ ID NOs: 131-134) are shown in italics

ATGGGAGGAGGAGATTATCACCAGCAGAGCCTCATCGGCGGTGCGGCTGTTCAT
GGCCATGGAGGGGGCACCGTGGAGGCTGCGCTGAGGCCGCTCGTCGGCGGCT [symbol] [symbol]
GTACTGGCGGCTCTCTCCTGACCAGAGGTTC
TTGGAGATGGCGGGTTTTTGCTGCAGCGCCGAGTTCGAGGCGCAGGTGGCC
ACGCTCGCCGACGTCCCTTGCTCCATCCCTCTTGACTCCTCCTCCATCGGGA
TGCACGCTCAGGCGCTACTGTCGAACCAGCCAATCTGGCAGAGCAGCGGCG
GGGCGCCGGGTCCGGATCTCCTCACGGGCTACGAGGCTG [symbol] [symbol] [symbol] [symbol]
CGGGATCGTCGAGCTCTTC
GCGTCGAGATATATGGTCGAGGAGCAGCAGATGGCGGAGCTGGTCATGGCG
CAGTGCGGTGGCGGTGGGCAGGGGTGGCAGGAGACGGAGGCGCAGGGGTT
CGCGTGGGACGCGGCGGCGGCGGCAGACTCGGGGCGGCTCTACGCGGCGGCG
TCGCTCAACCTGTTCGACGGCGCCGGGGGAAGCGGCTCCGGCGAGCCGTTCCTG
GCGGGAGTGCAGGACGACGGCGCGGCGGGCGTGGGGTGGCAGTACGCGGCGGA
GAGCAGCGAGCCGCCGTCGACAGTGGCGCAGGAGCATCAGCAGCTGCACGGCTC
GGGCGTGGGGAGGGCAGATTCAGGGTCGGAGGGGAGCGATATGCAGCTGGGGG
ACCCCGACGACGACGGCAACGGCGAGACGCAGAGGGGCTCCGGCAAAGACGGC
AAAGACGCAGAGGGGAAGCGGCAGCAGTGCAAGAACCTCGAGGCGGAGCGGAA
GCGGCGCAGGAAGCTCAACGACCGCCTGTACAAACTCCGGTCCCTCGTCCCCAA
CATTACTAAGATGGACCGGGCGTCGATCCTCGGGGACGCGATCGACTACATCGTG
GGGCTGCAGAAGCAGGTGAAGGACCTGCAGGACGAGCTGGAGGACCCGAACCC
GCCGGGGGTCACCGGCGGCGACAGCAAGGCCCCCGACGTGCTCCTCGACGACCA
CCCGCCGCCGGGCCTCGACAACGACGAGGACTCGCCGCAGCAGCAGCCGTTCCC
GTCGGCCGGCGGGAAGCGGCCCCGGAAGGAGGAGGCCGGCGACGAGGAGGAGA
AGGAGGCGGAGGACCAGGACATGGAGCCGCAGGTGGAGGTCCGGCAGGTGGAG
GGGAAGGAGTTCTTCCTGCAGGTGCTCTGCTCCCACAAGTCCGGGCGCTTCGTCC
GCATCATGGACGAGATCGCCGCCCTCGGCCTCCAGATCACCAGCGTCAACGTCA
CCTCCTACAACAAGCTCGTCCTCAACGTCTTCCGGGCCGTCATGAAGGACAACGA
GGCGGCGGTGCCGGCGGACAGGGTGAGGGACTCGCTGCTGGAGGTGACGAGGG
AGATGTACGGCGGGGCCGGGGCGTGGTCGTCCCCGGTCCCTCCGCCGCCGCTGA
CAAACGCGAAGCTCGATGGTATGGACGGGCAGGCGGTGCCGACGGTGGCCGGG
GAGCACTACCAGCTGCACCACCAGGTGCTGGGAGGATATCATCACCAGCATCTG
CAGTACCTCGCCATGGATTGA
SEQ ID NO: 131
CCCACGGCTGGGACTACTGCAT
SEQ ID NO: 132
CCTCCAGCGGCGGCGAGAAGAC
SEQ ID NO: 133
GGCTCCTCGTCCCCGTCGCCGG
SEQ ID NO: 134
CCTCGGGGACGCGATCGACTAC

[0239] Mfw3-B coding sequence (SEQ ID NO: 37), with the portion used for the Mfw-3/Mfw-5 hairpin described in Example 2 depicted in bold (SEQ ID NO: 55). Exemplary guide targeting sequences (SEQ ID NOs: 135-138) are shown in italics

ATGGGAGGAGGAGATTATCACCAGCAGAGCCTCAACGGCGGTGCGGCTGTTCAT
GGGCATGGAGGGGGAGGGGGCGGCACCGTGGAGGCTGCGCTGAGGCCGCTCGT
CGGCGGCT [symbol] [symbol] CTACTGGCGGCTCTCTCCTGACC
AGAGGTTCTTGGAGATGGCGGGGTTTTGCTGCAGCGCCGAGTTCGAGGCGC
AGGTGGCCACGCTCGCCGACGTGCCTTGCTCCATCCCTCTTGACTCCTCCTC
CGTCGGGATGCACGCTCAGGCGCTACTGTCGAACCAGCCAATCTGGCAGAG
CAGTGGCGGGTCGCCGGGCCCGGATCTCCTCACGGGCTACGAGGCTG [symbol] [symbol] [symbol] [symbol] [symbol]
CGGGATCGTCG
AGCTCTTCGCGTCGAGATATATGGCGGAGGAGCAGCAGATGGCTGAGCTGG
TCATGGCGCAGTGCGGTGGCGGTGGGCAGGGGTGGCAGGAGACGGAGGCG
CAGGGGTTCGCGTGGGACGCGGCGGCGGCAGACCCCGGGCGGCTCTACGCGG
CGGCGTCGCTCAACCTATTCGACGGCGCCGGGGGAAGCGGCTCCGGCGAGCCGT
TCCTGGCGGGAGTGCAGGAGGATGGCGCGGCGGGCGTGGGGTGGCAGTACGCG
GCAGAGAGCAGCGAGCCGCCGTCGACGGTGGCGCAGGAGCATCAGCAGCTGCA
CGGCTCGGGCGTGGGGAGGGCAGATTCGGGGTCGGAGGGGAGCGATATGCAGCT
GGGAGACCCCGACGACGAAGTCGACGGCGAGACGCAGAGGGGCTCCGGCAAAG
ACGGCTGCGGGAAGCGGCAGCAGTGCAAGAACCTCGAGGCGGAGCGGAAGCGG
CGGAAGAAGCTCAACGAACGCCTCTACAAGCTCCGGTCCCTCGTCCCAAACATT
ACCAAGATGGACCGGGCGTCGATCCTCGGGGACGCGATCGACTACATAGTGGGGC
TGCAGAAGCAGGTGAAGGACCTGCAGGACGAGCTGGAGGACCCAAACCTGCCG
GGGATCACCGGCGGCGACAGCAAGGCCCCCGACGTGCTCCTCGACGACCACCCG
CCGCCGGGCCTCGACAACGACGAGGACTCGCCGCAGCAGCAGCCGTTCCCGTCC
GCCGGCGGCAAGCGGCTCCGGAAGGAGGAGGCGGGCGACGAGGAGGAGAAGGA
GGCGGAGGACCAGGACATGGAGCCGCAGGTGGAGGTCCGGCAGGTGGAGGGGA
AGGAGTTCTTCCTACAGGTGCTGTGCTCCCACAAGTCCGGGCGCTTCGTCCGCAT
CATGGACGAGATCGCCGCCCTCGGCCTCCAGATTACCAGCATCAACGTCACCTCC
TACAACAAGCTCGTCCTCAACGTCTTCCGCGCCGTCATGAAGGACAACGAGGCG
GCGGTGCCGGCGGACAGGGTGAGGGACTCGCTGCTGGAGGTGACCAGGGAGAT
GTACAGCGGGGGCGGCACGTGGTCGTCCCCGGTCCCTCCGCCGCCGCCGACAAA
CGCAAAGCTCGATGGCATGGACGGGCAGGCGGTGCCGGCGGCCGCCGGGGACC
ACTACCAGCTGCACCACCAGGTGCTGGGAGGATATCATCACCAGCATCTGCAGT
ACCTCGCCATGGATTGA
SEQ ID NO: 135
CCCACGGCTGGGACTACTGCAT
SEQ ID NO: 136
CCTCCAGCGGCGGCGAGAAGAC
SEQ ID NO: 137
GGCTCCTCGTCCCCGTCGCCGG
SEQ ID NO: 138
CCTCGGGGACGCGATCGACTAC

[0240] Mfw3-D coding sequence (SEQ ID NO: 38), with the portion used for the Mfw-3/Mfw-5 hairpin described in Example 2 depicted in bold (SEQ ID NO: 56). Exemplary guide targeting sequences (SEQ ID NOs: 139-142) are shown in italics.

ATGGCAGGAGGAGACTATCACCAGCAGAGCATCATCGGCGGCCGTGCGGCTGTT
CATGGCCATGGAGGGGGAGGCGGCGGCACCGTGGAGGCTGCGCTCAGGCCGCT
CGTCGGCGGCG [symbol] [symbol] CTACTGGCGGCTCTCTCCTG
ACCAGCGGTTCTTGGAGATGACGGGGTTCTGCTGCAGCGCGGAGTTCGAGG
CGCAGGTGGCCACGCTCGCCGACGTCCCTTCCTCCATCCCTCTCGACTCCTC
CTCCATCGGGATGCACGCTCAGGCCCTGCTGTCGAACCAGCCGATCTGGCA
GAGCAGCGGCGGGGCGCCGGGTCCGGATCTACTCACGGGCTACGAGGCTT [symbol] [symbol] [symbol] [symbol] [symbol]
CGGCATCGT
CGAGCTCTTCGCTTCAAGATACATGGCGGAGGAGCAGCAGATGGCGGAGCT
GGTCATGGCGCAGTGCGGCGGCGGTGGGCAGGGATGGCAGGAGACGGAGG
CGCAGGGGTTTGCGTGGGACGCGGCAGCGGCAGACCCGGGGCGGCTCTACGC
GGCGGCGTCGCTCAACCTGTTCGACGGCGCCGGGGGAAGCGGCTCGGGCGAGCC
GTTCCTGGCGGGAGTGCAGGAGGACGGCGCGGCGGGCGTGGGTTGGCAGTACGC
GGCAGAGAGCAGCGAGCCGCCGTCGACGGTGGCGCAGGAGCATCAGCAGCTGC
ACGGCTCGGGCGTGGGGAGGGCGGACTCGGGGTCGGAGAGGAGTGACATGCAG
CTGGGGGACCCCGACGACAACGTCGACGGCGAGACGCAGAGGGGCTCCGGCAA
AGACGGCGGCGGGAAGCGGCAGCAGTGCAAGAACCTCATCGCGGAGCGGAAGC
GGCGCAAGAAGCTCAACAACCGCCTCTACACGCTCCGGTCCCTCGTCCCCAACAT
CACCAAGATGGACCGTGCGTCGATCCTCGGGGACGCGATCGACTACATCGTGGGG
CTGCAGAAGCAGGTGAAGGACCTGCAGGACGAGCTGGAGGACCCGAACCCGCC
GGGGGTCACCGGCGGCCACAGCAAGGCCCCCGACGTGCTCCTCGACGACCACCC
GCCGCCGGGCCTCGACAACGACGAGGACTCGCCGCAGCAGCAGCCGTTCCCGTC
CGCCGCCGGCAAGCGGCCCCGGAAGGTGGAGGCGGGCGAGGAGGAGGAGAAGG
AGGCGGAGGACCAGGACATGGAGCCGCAGGTGGAGGTCCGGCAGGTGGAGGGG
AAGGAGTTCTTCCTGCAGGTGCTGTGCTCCCACAAGTCCGGGCGCTTCGTCCGCG
TCATGGACGAGATCGCCGCCCTCGGCCTCCAGATCACCAGCGTCAACGTCACCTC
CTACAACAAGCTCGTCCTCAACGTCTTCCGCGCCGTCATGAAGGACAACGAGGC
GGCGGTGCCGGCGGACAGGGTGAGGGACTCGCTGCTGGAGGTGACGAGGGAGA
TGTACGGCGGGGGCGGCGCGTGGTCGTCCCCGCTCCCCCCGCCGCCGCCGACGA
ACGCGAAGCTCGATGGCATGGACGGGCAGGCGGTGCCGGCGGCGGCCGGGGAC
CACTACCAGCTGCACCACCAGGTGCTGGGAGGATATCACCACCAGCATCTGCAG
TACCTCGCCATGGATTGA
SEQ ID NO: 139
CCCACGGCTGGGACTACTGCAT
SEQ ID NO: 140
CCTCCAGCGGCGGCGAGAAGAC
SEQ ID NO: 141
GGCTCCTCGTCCCCGTCGCCGG
SEQ ID NO: 142
CCTCGGGGACGCGATCGACTAC

[0241] Mfw5-A coding sequence (SEQ ID NO: 129), with the portion used for the Mfw-3/Mfw-5 hairpin described in Example 2 depicted in bold (SEQ ID NO: 57). Exemplary guide targeting sequences (SEQ ID NOs: 143-146) are shown in italics.

ATGACAGGATCTTTGACCCATGATTCTTCTCTGGCTCCTAAATGCAACGACAACACAAAT
ATTGAGCTACAGAGATTCAAGGTGCAGTCGTTTTCTGCAGATATCCTTTCTGATTCGACCAA
TCTTTCTTCTGAAGCTGCAAGAGCAATCAACCACCTTCAGCATCAACTAGGAATTGGTTT
GGAGCAGGATATGCGACCAGTGGAAACTGCGA [symbol] [symbol] CATTC
AAGACCAAATAATCAACCATCAGCTTAGCGAAGATCCACAAAACATATTGGTGCAA
CAACAGATTCAACAGTATGATGCTGCGCTTTATCCAAACAGTGGTTACACA [symbol] [symbol]
TTCTCCACTGCACTGTGGCTCCAGTGTTCCCTCCAACAGCAT
CAGTTTTTGGTGATACAGCACTAAGTGGTGGTACCAACTATTTGGATCTTAATGATG
AGTTTACAGGAGTGGCAGCAATTCCTGACAGTGGATTAATGTACACTAGTGATCCG
GCATTGCAGTTAGGGTACCATGCTGCCCAGTCTCACGCACTAAAGGATATCTGCCA
TTCACTGCCGCAAAATTATGGGCTGTT [symbol] [symbol] GCCATCCTT
GGGGTTGGAAGTGTCGGAGGAGATCTTTTTCAGGATATGGATGACAGGCAATTTGATA
CTGTACTGGAGGGCAGAAGAGGGAAGGGTGACTTCGGAAAGGGAAAAGGAAAAGCTAA
CTTTGCGACAGAGAGAGAGAGGAGGGAACAGCTAAATGTGAAGTATAAGACTTTAAGA
ATGCTCTTCCCCAATCCTACCAAGAATGACAGGGCTTCAGTAGTAGGTGATGCCATTGAA
TACATAGATGAGCTGAATCGAACAGTGAAGGAACTGAAGATCCTAGTGGAACAGAAGTG
GCATGGGACTAATAGGAGAAAGATAAGAAAGTTGGATGAAGAGGCCGCTGCTGATGGT
GAAAGCTCATCGATGAGGCCAATAAGGGATGAGCAAGACAATCAGCTTGATGGGGCCAT
AAGAAGCTCATGGGTTCAGAGGAGGTCCAGGGAGTGCCATGTTGATGTTCGCATAGTGG
AAAATGAAATAAACATCAAGCTCACAGAAAAGAAGACGACCAACTCCTCCCTGCTTCAT
GTTGCAAAGGTTCTTGATGAATTCCATCTTGAGATCATCCATGTGGTTGGAGGGATTATT
GGTGATCACTACATATTCATGTTTAACACTAAGGTGTCTGAAGGTTCCTCAATTTATGCTT
GTGCAGTGGCAAAGAGGATCCTTCAAGCAGTGGATGCACAACACCAGGCACTTGACATA
TTCAACTAG
SEQ ID NO: 143
ATTGAGCTACAGAGATTCAAGG
SEQ ID NO: 144
CCTGGGATACTTCTATCTGCAC
SEQ ID NO: 145
CCAGCACCTGATCTCTTAAACC
SEQ ID NO: 146
CCCCAGTGAGGATGAAAGAGAT

[0242] Mfw5-B coding sequence (SEQ ID NO: 130), with the portion used for the Mfw-3/Mfw-5 hairpin described in Example 2 depicted in bold (SEQ ID NO: 58). Exemplary guide targeting sequences (SEQ ID NOs: 147-150) are shown in italics.

ATGGGACTTCTCTACACGGAAGAACAGACAGCCACATTGCATAGCTTAAAACTC
CACGGCTCTACCTCTTTTGCAACAACCAAAACAGCCAGGCCAACTGCAATTNNN
NNNCATGATTCTTCTCTGGCTCCTAAATGCAACGACAACACAAATATTGAGCTACA
GAGATTCAAGGTGCAGTCGTTTTCTGCAGATATCCTTTCTGATTCGACCAATCTTTC
TTCTGAAGCTGCAAGAGCGATCAACCACCTCCAGCATCAACTAGGAATTGGTTTG
GAGCAGGATATGCCGCCAGTGGGAACTGCGA [symbol] [symbol]
ATTCAAGACCAAATTATCAACCATCAGCTTAGCGAAGATCCACAAAACATAT
TGGTGCAACAACAGATTCAACAGTATGATGCTGCGCTTTATCCAAACAGTGG
TTACACA [symbol] [symbol] TTCTCCACTGCACTGTGGCTCCAGT
GTTCCCTGCAACAGCATCAGTCTTTGGTGATACAGCACTAAGTGGTGATACC
AACTATTTGGATCTTAATGGTGAGTTTACAGGAGTGGCAGCAATTCCTGACA
GTGGATTAATGTACACTAGTGATCCAGCATTGCAGTTAGGGTACCATGCTGC
CCAGTCTCACGCACTAAAGGATATCTGCCATTCACTGCCGCAAAATTATGGG
CTCTT [symbol] [symbol] GTCATGCTTGGGGTTGGAAGTGTCGG
AGGAGATCTTTTTCAGGATATAGATGACAGGCAATTTGATACTGTACTGGAGGGC
AGAAGAGGAAAGGGTGAGTTCGGAAAAGGAAAAGGAAAAGCTAACTTTGCGAC
TGAGAGAGAGAGGAGGGAACAACTCAATGTGAAGTATAAGACGTTAAGAATGCT
CTTCCCCAACCCTACCAAGAATGACAGGGCTTCAGTAGTAGGTGATGCCATTGAA
TACATAGATGAGCTGAATCGAACAGTGAAGGAACTGAAGATCCTAGTGGAACAG
AAGTGGCATGGGACTAATAGGAGAAAGATAAGAAAGTTGGATGAAGAGGCGGC
TGCTGATGGTGAAAGCTCATCGATGAGGCCAATGAGGGATGAGCAAGACAATCA
GCTTGATGGGGCCATAAGAAGCTCATGGGTTCAGAGGAGGTCCAGGGAGTGCCA
TGTTGATGTTCGCATAGTGGAAAATGAAATAAACATCAAGCTCACAGAAAAGAA
GAAGACCAACTCCTCCCTGCTTCATGTTGCAAAGGTTCTTGATGAATTCCATCTT
GAGATCATCCATGTAGTTGGAGGGATTATTGGTGATCACTACATATTCATGTTTA
ACACTAAGGTGACTGAAGGTTCCTCAGTTTATGCTTGTGCAGTGGCAAAGAGGAT
CCTTCAAGCAGTGGATGCACAACACCAGGCACTTGACATATTCAACTAG
SEQ ID NO: 147
ATTGAGCTACAGAGATTCAAGG
SEQ ID NO: 148
CCTGGGATACTTCTATCTGCAC
SEQ ID NO: 149
CCAGCACCTGATCTCTTAAACC
SEQ ID NO: 150
CCCCAGTGAGGATGAAAGAGAT

[0243] Mfw5-D coding sequence (SEQ ID NO: 41), with the portion used for the Mfw-3/Mfw-5 hairpin described in Example 2 depicted in bold (SEQ ID NO: 59). Exemplary guide targeting sequences (SEQ ID NOs: 151-154) are shown in italics.

ATGCCACCAGTGGAAACTGCGA [symbol] [symbol] CATTCAAGAC
CAAATAATCAACCATCAGCTTAGCGAAGATCCACAAAACATATTGGTGCAAC
AACAGATTCAACAGTATGATGCTGCGCTTTATCCAAACAGTGGTTACACA [symbol] [symbol] [symbol] [symbol]
TTCTCCACTGCACTGTGGCTCCAGTGTTCCCTGC
AACAGCATCAGTCTTTGGTGATACAGCACTAAGTGGTGGTACCAACTATTTG
GATCTTAATGGTGAGTTTACAGGAGTGGCAGCAATTCCTGACAGCGGATTA
ATGTACACTAGTGATCCGGCATTGCAGTTAGGGTACCATGCTGCCCCGTCTC
ACGCACTAAAGGATATCTGCCATTCACTGCCGCAAAATTATGGACTGTT [symbol] [symbol] [symbol]
GTCATGCTTGGGGTTGGAAGTGTCGGAGGAGATC
TTTTTCAGGATATGGATGACAGGCAATTTGAAACTGTACTGGAGGGCAGAAGAG
GGAAGGGTGAGTTCGGAAAGGGAAAAGGAAAAGCTAACTTTGCGACTGAGAGA
GAGAGGAGGGAACAGCTAAATGTGAAGTATAAGACTTTAAGAATGCTCTTCCCC
AATCCTACCAAGAATGACAGGGCTTCAGTAGTAGGTGATGCCATTGAATACATA
GATGAGCTGAATCGAACAGTGAAGGAACTGAAGATCCTAGTGGAACAGAAGTG
GCATGGGACTAATAGGAGAAGGACAAGAAAGTTGGATGAAGAGGCGGCTGCTG
ATGGTGAAAGCTCATCGATGAGGCCAATGAGGGATGAGCAAGACAATCAGCTTG
ATGGGGCCATAAGAAGCTCATGGGTTCAGAGGAGGTCCAGGGAGTGCCATGTTG
ATGTTCGCATAGTGGAAAATGAAATAAACATCAAGCTCACAGAAAAGAAGAAG
GCCAACTCCTCCCTGCTTCATGTTGCAAAGGTTCTTGACGAATTCCATCTTGAGAT
CATCCATGTGGTTGGAGGGATTATTGGTGATCACTACATATTCATGTTTAACACT
AAGGTGACTGAAGGTTCCTCAGTTTATGCTTGTGCAGTGGCAAAGAGGATCCTTC
AGGCAGTGGATGCACAACACCAGGCACTTGACATATTCAACTAG
SEQ ID NO: 151
CCTGGGATACTTCTATCTGCAC
SEQ ID NO: 152
CCAGCACCTGATCTCTTAAACC
SEQ ID NO: 153
CCAGCACCTGATCTCTTAAACC
SEQ ID NO: 154
CCCCAGTGAGGATGAAAGAGAT

[0244] Cas9 and sgRNA sequences can be expressed either stably or transiently in a cell in order to generate the deactivating modifications described herein. In one aspect of any of the embodiments, described herein is a wheat cell comprising 1) an exogenous Cas9 protein and/or an exogenous nucleic acid encoding a Cas9 protein: and 2) at least one sgRNA capable of specifically hybridizing with at least one Mfw and/or Mpew gene sequence under cellular conditions or a nucleic acid encoding such an sgRNA. In some embodiments of any of the aspects, the sgRNA can comprise a sequence selected from SEQ ID NOs: 22-29 and/or 131-154. In some embodiments of any of the aspects, the 1) exogenous nucleic acid encoding a Cas9 protein: and 2) the nucleic acid encoding at least one sgRNA capable of specifically hybridizing with at least one Mfw and/or Mpew gene sequence under cellular conditions are provided in a vector or vector(s). In some embodiments of any of the aspects, the vectors are transient expression vectors. In some embodiments of any of the aspects, the 1) exogenous nucleic acid encoding a Cas9 protein: and 2) the nucleic acid encoding at least one sgRNA capable of specifically hybridizing with at least one Mfw and/or Mpew gene sequence under cellular conditions are integrated into the genome. It is contemplated herein that similar approaches to vector delivery, transient expression, and/or stable integration can also be utilized in embodiments relating to, e.g., inhibitory RNAs, TALENs, and/or ZFNs.

[0245] In one aspect of any of the embodiments, described herein is a nucleic acid encoding at least one sgRNA capable of specifically hybridizing with at least one Mfw and/or Mpew gene sequence, e.g., under cellular conditions. In one aspect of any of the embodiments, described herein is a nucleic acid encoding at least one sgRNA capable of targeting Cas9 or a related endonuclease to at least one Mfw and/or Mpew gene sequence, e.g., under cellular conditions. In some embodiments of any of the aspects, the sgRNA can comprise a sequence that can specifically hybridize, in the cell, to a sequence selected from SEQ ID NOs: 1-12. In some embodiments of any of the aspects, the sgRNA can comprise a sequence selected from SEQ ID NOs: 22-29 and/or 131-154. In some embodiments of any of the aspects, the nucleic acid further encodes a Cas9 protein. In some embodiments of any of the aspects, the nucleic acid is provided in a vector. In some embodiments of any of the aspects, the vector is a transient expression vector.

[0246] Further described herein are methods and compositions relating to a ‘maintainer line’ for the male-sterile(s) plants described herein. In one aspect, the deactivated genes can be introgressed into the cytoplasmic genome of the male-sterile lines. This will produce a male-fertile phenotype which is not pollen-transmitted to the male-sterile line it fertilises, enabling maintenance of the male-sterile lines. An illustrative example of this approach is depicted schematically in FIG. 10. This maintainer line then allows the maintenance of the male-sterility by crossing with the male sterile line. The pollen is viable on the maintainer line allowing seed set of/on the male-sterile line, but, after sowing such seed, the resulting plant is still male-sterile, because the wild-type Mfw is plastid-located in the maintainer line and therefore Mfw is not inherited through its pollen (FIG. 14).

[0247] Accordingly, in one aspect, described herein is a wheat plant and/or seed comprising a) a deactivating modification of each nuclear copy of one or more Mfw and/or Mpew genes and b) a nucleic acid encoding an exogenous wild-type sequence of at least one of the Mfw and/or Mpew genes, wherein the nucleic acid is located in the cytoplasmic genome. In some embodiments, each member of a gene family can be deactivated and the maintainer line can comprise a nucleic acid encoding an exogenous wild-type sequence of one member of the gene family, e.g., the male-sterile phenotype can be rescued by restoring expression of one member of a functionally redundant group.

[0248] Alternatively, a maintainer line can be generated by introducing a maintainer line construct into the male sterile cell or plant. In some embodiments, such construct can comprise 1) an Mfw gene (appropriate to counteract the mfw male-sterility gene concerned) 2) a “pollen death” PD gene and 3) a herbicide tolerant (hereinafter ‘HT’)—or other appropriate selectable marker gene—to enable deselection of non-transformants (together this is referred to herein as a Mfw/PD/HT construct).

[0249] As used herein, a Mfw/PD/HT construct is a gene or group of genes that, when introduced, in a hemizygous manner, into a plant with a male-sterile phenotype due to deactivation of a Mfw and/or Mpew gene as described herein, conveys a meiosis-competent phenotype that results in post-meiosis pollen death or non-viability in the gamete receiving the hemizygous Mfw/PD/HT construct. Non-viability here, is the lack of ability, for whatever reason, to effect fertilisation of a wheat ovule. The transgene-hemizygote pollen mother cell will, after meiosis, produce pollen sperm cells which, 50:50, contain either the transgene or do not. The pollen sperm cells with the transgene will die or be non-viable; those without it will survive and be viable for fertilisation. The surviving pollen sperm cells can then self-pollinate their parent plant or, after dispersal, cross-pollinate another plant, eg a male-sterile F1 parent line plant. In the latter case, because the transgene construct with its dominant male-fertility, Mfw gene has been eliminated by its post-meiosis Mfw/PD/HT gene, the remaining pollen will only contain the recessive mfw male-sterility gene and will not transfer the Mfw male-fertility of the fully fertile parent.

[0250] In embodiment of any of the aspects, a Mfw/PD/HT construct comprises a) nucleic acid comprising a wild-type sequence of at least one of the Mfw and/or Mpew genes which have been deactivated, wherein the deactivating modifications of the Mfw and/or Mpew are found in the coding sequences themselves (e.g., not by introducing an inhibitory nucleic acid) and b) an inhibitory nucleic acid targeting a post-meiosis-expressed pollen viability gene such as Mfw1, wherein the inhibitory nucleic acid is under the control of a pollen-specific promoter, e.g., a late-pollen specific promoter. The pollen specific promoter can avoid the gene being activated earlier, eg in the tapetum, when all pollen cells might be affected rather than just those with the transgene.)

[0251] In some embodiments of any of the aspects, a Mfw/PD/HT construct can comprise a) a pollen-cytotoxic gene under the control of a pollen-specific promoter and b) a nucleic acid comprising a wild-type sequence of at least one of the Mfw and/or Mpew genes which have been deactivated, wherein the deactivating modifications of the Mfw and/or Mpew are found in the coding sequences themselves (e.g., not by introducing an inhibitory nucleic acid) and, c) an HT gene. The hemizygous female megasporocyte will produce, 50:50, ovules which contain the construct or do not. Once fertilised by 100% mfw pollen the resultant embryos and seed will be, 50:50, transgenic or not; the former will be male-fertile due to expression of the construct's Mfw gene, the latter will be male-sterile due to the lack of Mfw gene expression. In a seed production field intended to produce pollinators for the male-sterile line, the 50% male-sterile plants are a hindrance and if an HT gene is present, the male-sterile plants can be eliminated by spraying the seed production field with the herbicide for which the transgene is tolerant. The embodiments described herein which relate to use of an HT gene can provide certain advantages over other approaches, e.g., the use of a seed endosperm pigmentation gene. Because of the relative opaqueness of wheat's seed coat and small size of wheat seeds, colour separation approaches can incur high costs without achieving optimal accuracy. Use of HT genes in wheat plants as described herein is contemplated to provide increased accuracy and lower cost per acre as compared to the use of seed coat pigmentation approaches. Nevertheless, in some embodiments, for extra confidence of lack of transgenes in the male-sterile for example, a color selectable marker gene can be added to the construct.

[0252] An illustrative example of this approach is depicted schematically in FIG. 11. Exemplary pollen-specific promoters for use in wheat are known in the art and can include, by way of non-limiting example, pPG47 and TaPSG719 (see, e.g, Chen, L., Tu, Z., Hussain, J. et al. Mol Biol Rep (2010) 37: 737; which is incorporated by reference herein in its entirety). Exemplary pollen-cytotoxic genes are known in the art and can include alpha-amylase, barnase (see, e.g., Zhang et al Plant Physiology (2012) 159:1319-1334; which is incorporated by reference herein in its entirety, and orf288 (see, e.g, Jing et al. J. Exp. Bot. (2012) 63:1285-1295; which is incorporated by reference herein in its entirety). In some embodiments of any of the aspects, the pollen-cytotoxic gene is not an alpha-amylase gene, not an amylase gene, and/or has less than 60% sequence identity with the ms45 gene from Zea mays.

[0253] In some embodiments of any of the aspects, the nucleic acid comprising a wild-type sequence of at least one of the Mfw and/or Mpew genes can be operably linked to a promoter. In some embodiments of any of the aspects, the promoter operably linked to the nucleic acid comprising a wild-type sequence of at least one of the Mfw and/or Mpew genes can be an anther-specific promoter.

[0254] In some embodiments of any of the aspects, the HT gene can be a glyphosate-tolerance gene. In some embodiments of any of the aspects, the HT gene can be operably linked to a constitutive promoter.

[0255] In some embodiments of any of the aspects, a Mfw/PD/HT construct can be introduced into the genome, e.g., stably integrated at a location other than at the original Mfw and/or Mpew locus which was deactivated.

[0256] Accordingly, in one aspect of any of the embodiments, described herein is a wheat plant and/or seed comprising a deactivating modification of each nuclear copy of one or more Mfw and/or Mpew genes and further comprising a Mfw/PD/HT construct. In some embodiments, the Mfw/PD/HT construct is located in the nuclear genome.

[0257] In some embodiments of any of the aspects, the Mfw/PD/HT construct can further comprise an extra selection gene and/or selection construct, e.g., one that allows a seed comprising the Mfw/PD/HT construct to be distinguished from seeds not comprising the Mfw/PD/HT construct. In some embodiments of any of the aspects, the selection gene permits one to distinguish the seeds by visual and/or optical means, e.g., the selection gene can convey a non-standard color to the seed including to seed produced as a result of fertilisation by pollen containing the color-selection gene. In some embodiments of any of the aspects described herein, a plant, seed, and/or maintainer line as described herein can further comprise a selectable marker gene and/or selectable marker construct. The selectable marker gene and/or selectable marker construct can comprise a selectable marker, e.g. a marker that conveys an optically-detectable difference in seed coat color, under the control of a promoter which permits expression of the selectable marker gene at least in the endosperm. Thus, a seed or plant resulting from pollination with a pollen grain comprising selectable marker gene and/or selectable marker construct will express the selectable marker. Such markers can be selected against and/or screened against in order to provide a group of seeds and/or plants which do not comprise the selectable marker gene and/or construct, and thus also do not comprise the Mfw/PD/HT. Such an approach can prevent undesired dissemination of transgenic material. Exemplary selectable markers can include a blue aleurone (Ba) layer selectable marker gene. The Ba selectable marker gene and its use are known in the art, e.g., see U.S. Pat. No. 6,407,311. In some embodiments, the selectable marker construct can comprise multiple copies of the selectable marker, e.g., 2 copies, 3 copies, or more copies, and/or the selectable marker can be expressed by a strong promoter, e.g., to ensure desired levels of phenotypic penetrance and expression.

[0258] Maintainer lines comprising a Mfw/PD/HT construct permit the maintenance of the male-sterility by crossing with the male-sterile line. The maintainer line's pollen, containing only mfw alleles due to Mfw-containing pollen having been eliminated by the post-meiosis PD gene, is viable on the male-sterile line and enables seed set of the male-sterile line without transferring any Mfw male-fertility alleles (FIG. 12).

[0259] In some embodiments, each member of a gene family can be deactivated and the maintainer line can comprise an exogenous copy of one member of the gene family, e.g., the male-sterile phenotype can be rescued by restoring expression of one member of a functionally redundant group.

[0260] It is further contemplated herein that once male-sterile and maintainer material has been produced, the deactivated genes/alleles/characters and/or deactivating modifications can be transferred to elite standard lines by normal backcrossing (with appropriate marker-assisted selection for the male-sterile material) (FIG. 16).

[0261] The methods and compositions described herein provide a number of advantages over existing wheat technologies. For example, a low cost of final production; no special spraying of the intended male-sterile lines in potentially large-scale F1 seed production field to create the necessary male-sterile trait in the seed-producing parent; a low cost of breeding (many test-crosses can be made with wild-type, standard lines being potential pollinator lines (with wild-type dominant fertility), and no separate breeding programme to produce ‘final’ pollinator lines); the final F1 production and seed sold may not be classified as “genetically modified” under some jurisdictions' consumer guidelines or seed or GM regulations. For convenience, the meaning of some terms and phrases used in the specification, examples, and appended claims, are provided below. Unless stated otherwise, or implicit from context, the following terms and phrases include the meanings provided below. The definitions are provided to aid in describing particular embodiments, and are not intended to limit the claimed invention, because the scope of the invention is limited only by the claims. Unless otherwise defined, all technical and scientific terms used herein have the same meaning as commonly understood by one of ordinary skill in the art to which this invention belongs. If there is an apparent discrepancy between the usage of a term in the art and its definition provided herein, the definition provided within the specification shall prevail.

[0262] For convenience, certain terms employed herein, in the specification, examples and appended claims are collected here.

[0263] The terms “decrease”, “reduced”, “reduction”, or “inhibit” are all used herein to mean a decrease by a statistically significant amount. In some embodiments, “reduce,” “reduction” or “decrease” or “inhibit” typically means a decrease by at least 10% as compared to a reference level (e.g. the absence of a given agent) and can include, for example, a decrease by at least about 10%, at least about 20%, at least about 25%, at least about 30%, at least about 35%, at least about 40%, at least about 45%, at least about 50%, at least about 55%, at least about 60%, at least about 65%, at least about 70%, at least about 75%, at least about 80%, at least about 85%, at least about 90%, at least about 95%, at least about 98%, at least about 99%, or more. As used herein, “reduction” or “inhibition” does not encompass a complete inhibition or reduction as compared to a reference level. “Complete inhibition” is a 100% inhibition as compared to a reference level.

[0264] The terms “increased”, “increase”, “enhance”, or “activate” are all used herein to mean an increase by a statistically significant amount. In some embodiments, the terms “increased”, “increase”, “enhance”, or “activate” can mean an increase of at least 10% as compared to a reference level, for example an increase of at least about 20%, or at least about 30%, or at least about 40%, or at least about 50%, or at least about 60%, or at least about 70%, or at least about 80%, or at least about 90% or up to and including a 100% increase or any increase between 10-100% as compared to a reference level, or at least about a 2-fold, or at least about a 3-fold, or at least about a 4-fold, or at least about a 5-fold or at least about a 10-fold increase, or any increase between 2-fold and 10-fold or greater as compared to a reference level.

[0265] As used herein, the terms “protein” and “polypeptide” are used interchangeably herein to designate a series of amino acid residues, connected to each other by peptide bonds between the alpha-amino and carboxy groups of adjacent residues. The terms “protein”, and “polypeptide” refer to a polymer of amino acids, including modified amino acids (e.g., phosphorylated, glycated, glycosylated, etc.) and amino acid analogs, regardless of its size or function. “Protein” and “polypeptide” are often used in reference to relatively large polypeptides, whereas the term “peptide” is often used in reference to small polypeptides, but usage of these terms in the art overlaps. The terms “protein” and “polypeptide” are used interchangeably herein when referring to a gene product and fragments thereof. Thus, exemplary polypeptides or proteins include gene products, naturally occurring proteins, homologs, orthologs, paralogs, fragments and other equivalents, variants, fragments, and analogs of the foregoing.

[0266] In the various embodiments described herein, it is further contemplated that variants (naturally occurring or otherwise), alleles, homologs, conservatively modified variants, and/or conservative substitution variants of any of the particular polypeptides described are encompassed. As to amino acid sequences, one of skill will recognize that individual substitutions, deletions or additions to a nucleic acid, peptide, polypeptide, or protein sequence which alters a single amino acid or a small percentage of amino acids in the encoded sequence is a “conservatively modified variant” where the alteration results in the substitution of an amino acid with a chemically similar amino acid and retains the desired activity of the polypeptide. Such conservatively modified variants are in addition to and do not exclude polymorphic variants, interspecies homologs, and alleles consistent with the disclosure.

[0267] The degree of homology (percent identity) between a native and a mutant sequence can be determined, for example, by comparing the two sequences using freely available computer programs commonly employed for this purpose on the world wide web (e.g. BLASTp or BLASTn with default settings).

[0268] As used herein, the term “nucleic acid” or “nucleic acid sequence” refers to any molecule, preferably a polymeric molecule, incorporating units of ribonucleic acid, deoxyribonucleic acid or an analog thereof. The nucleic acid can be either single-stranded or double-stranded. A single-stranded nucleic acid can be one nucleic acid strand of a denatured double-stranded DNA. Alternatively, it can be a single-stranded nucleic acid not derived from any double-stranded DNA. In one aspect, the nucleic acid can be DNA. In another aspect, the nucleic acid can be RNA. Suitable DNA can include, e.g., genomic DNA or cDNA. Suitable RNA can include, e.g., mRNA.

[0269] In some embodiments of any of the aspects, a polypeptide, nucleic acid, or cell as described herein can be engineered. As used herein, “engineered” refers to the aspect of having been manipulated by the hand of man. For example, a polypeptide is considered to be “engineered” when at least one aspect of the polypeptide, e.g., its sequence, has been manipulated by the hand of man to differ from the aspect as it exists in nature. As is common practice and is understood by those in the art, progeny of an engineered cell are typically still referred to as “engineered” even though the actual manipulation was performed on a prior entity.

[0270] In some embodiments, a nucleic acid encoding an RNA or polypeptide as described herein can be introduced into a cell by, e.g., biolistic delivery.

[0271] In some embodiments, a nucleic acid encoding an RNA or polypeptide as described herein is comprised by a vector. In some of the aspects described herein, a nucleic acid sequence encoding a given polypeptide as described herein, or any module thereof, is operably linked to a vector. The term “vector”, as used herein, refers to a nucleic acid construct designed for delivery to a host cell or for transfer between different host cells. As used herein, a vector can be viral or non-viral. The term “vector” encompasses any genetic element that is capable of replication when associated with the proper control elements and that can transfer gene sequences to cells. A vector can include, but is not limited to, a cloning vector, an expression vector, a plasmid, phage, transposon, cosmid, chromosome, virus, virion, etc. Exemplary vectors are known in the art and can include, by way of non-limiting example, pBR322 and related plasmids, pACYC and related plasmids, transcription vectors, expression vectors, phagemids, yeast expression vectors, plant expression vectors, pDONR201 (Invitrogen), pBI121, pBIN20, pEarleyGate100 (ABRC), pEarleyGate102 (ABRC), pCAMBIA, pUC-derived vectors, pSK-derived vectors, pGEM-derived vectors, pSP-derived vectors, pBS-derived vectors, the binary Ti plasmid (see, e.g., U.S. Pat. No. 4,940,838; which is incorporated by reference herein in its entirety), T-DNA, transposons, and artificial chromosomes.

[0272] As used herein, the term “expression vector” refers to a vector that directs expression of an RNA or polypeptide from sequences operably linked to transcriptional regulatory sequences on the vector. The term “operably linked” as used herein refers to a functional linkage between a regulatory element and a second sequence, wherein the regulatory element influences the expression and/or processing of the second sequence. Generally, “operably linked” means that the nucleic acid sequences being linked are contiguous and, where necessary to join two protein coding regions, contiguous and in the same reading frame. The regulatory sequence, e.g., a promoter, can be a constitutive, tissue-specific, and/or inducible promoter. The sequences expressed will often, but not necessarily, be heterologous to the cell. An expression vector may comprise additional elements, for example, the expression vector may have two replication systems, thus allowing it to be maintained in two organisms, for example in plant cells for expression and in a prokaryotic host for cloning and amplification. The term “expression” refers to the cellular processes involved in producing RNA and proteins and as appropriate, secreting proteins, including where applicable, but not limited to, for example, transcription, transcript processing, translation and protein folding, modification and processing. “Expression products” include RNA transcribed from a gene, and polypeptides obtained by translation of mRNA transcribed from a gene. The term “gene” means the nucleic acid sequence which is transcribed (DNA) to RNA in vitro or in vivo when operably linked to appropriate regulatory sequences. The gene may or may not include regions preceding and following the coding region, e.g. 5′ untranslated (5′UTR) or “leader” sequences and 3′ UTR or “trailer” sequences, as well as intervening sequences (introns) between individual coding segments (exons).

[0273] As used herein, the term “viral vector” refers to a nucleic acid vector construct that includes at least one element of viral origin and has the capacity to be packaged into a viral vector particle. The viral vector can contain the nucleic acid encoding a polypeptide as described herein in place of non-essential viral genes. The vector and/or particle may be utilized for the purpose of transferring any nucleic acids into cells either in vitro or in vivo. Numerous forms of viral vectors are known in the art.

[0274] By “recombinant vector” is meant a vector that includes a heterologous nucleic acid sequence, or “transgene” that is capable of expression in vivo. It should be understood that the vectors described herein can, in some embodiments, be combined with other suitable compositions and therapies. In some embodiments, the vector is episomal. The use of a suitable episomal vector provides a means of maintaining the nucleotide of interest in the subject in high copy number extra chromosomal DNA thereby eliminating potential effects of chromosomal integration.

[0275] The term “statistically significant” or “significantly” refers to statistical significance and generally means a two standard deviation (2SD) or greater difference.

[0276] Other than in the operating examples, or where otherwise indicated, all numbers expressing quantities of ingredients or reaction conditions used herein should be understood as modified in all instances by the term “about.” The term “about” when used in connection with percentages can mean±1%.

[0277] As used herein, the term “comprising” means that other elements can also be present in addition to the defined elements presented. The use of “comprising” indicates inclusion rather than limitation.

[0278] The term “consisting of” refers to compositions, methods, and respective components thereof as described herein, which are exclusive of any element not recited in that description of the embodiment.

[0279] As used herein the term “consisting essentially of” refers to those elements required for a given embodiment. The term permits the presence of additional elements that do not materially affect the basic and novel or functional characteristic(s) of that embodiment of the invention.

[0280] The singular terms “a,” “an,” and “the” include plural referents unless context clearly indicates otherwise. Similarly, the word “or” is intended to include “and” unless the context clearly indicates otherwise. Although methods and materials similar or equivalent to those described herein can be used in the practice or testing of this disclosure, suitable methods and materials are described below. The abbreviation, “e.g.” is derived from the Latin exempli gratia, and is used herein to indicate a non-limiting example. Thus, the abbreviation “e.g.” is synonymous with the term “for example.”

[0281] Groupings of alternative elements or embodiments of the invention disclosed herein are not to be construed as limitations. Each group member can be referred to and claimed individually or in any combination with other members of the group or other elements found herein. One or more members of a group can be included in, or deleted from, a group for reasons of convenience and/or patentability. When any such inclusion or deletion occurs, the specification is herein deemed to contain the group as modified thus fulfilling the written description of all Markush groups used in the appended claims.

[0282] It should be understood that this invention is not limited to the particular methodology, protocols, and reagents, etc., described herein and as such can vary. The terminology used herein is for the purpose of describing particular embodiments only, and is not intended to limit the scope of the present invention, which is defined solely by the claims. Definitions of common terms in immunology and molecular biology can be found in Robert S. Porter et al. (eds.), The Encyclopedia of Molecular Cell Biology and Molecular Medicine, published by Blackwell Science Ltd., 1999-2012 (ISBN 9783527600908); and Robert A. Meyers (ed.), Molecular Biology and Biotechnology: a Comprehensive Desk Reference, published by VCH Publishers, Inc., 1995 (ISBN 1-56081-569-8); Michael Richard Green and Joseph Sambrook, Molecular Cloning: A Laboratory Manual, 4th ed., Cold Spring Harbor Laboratory Press, Cold Spring Harbor, N.Y., USA (2012) (ISBN 1936113414); Davis et al., Basic Methods in Molecular Biology, Elsevier Science Publishing, Inc., New York, USA (2012) (ISBN 044460149X); Laboratory Methods in Enzymology: DNA, Jon Lorsch (ed.) Elsevier, 2013 (ISBN 0124199542); Current Protocols in Molecular Biology (CPMB), Frederick M. Ausubel (ed.), John Wiley and Sons, 2014 (ISBN 047150338X, 9780471503385), and Current Protocols in Protein Science (CPPS), John E. Coligan (ed.), John Wiley and Sons, Inc., 2005; the contents of which are all incorporated by reference herein in their entireties.

[0283] Other terms are defined herein within the description of the various aspects of the invention.

[0284] All patents and other publications; including literature references, issued patents, published patent applications, and co-pending patent applications; cited throughout this application are expressly incorporated herein by reference for the purpose of describing and disclosing, for example, the methodologies described in such publications that might be used in connection with the technology described herein. These publications are provided solely for their disclosure prior to the filing date of the present application. Nothing in this regard should be construed as an admission that the inventors are not entitled to antedate such disclosure by virtue of prior invention or for any other reason. All statements as to the date or representation as to the contents of these documents is based on the information available to the applicants and does not constitute any admission as to the correctness of the dates or contents of these documents.

[0285] The description of embodiments of the disclosure is not intended to be exhaustive or to limit the disclosure to the precise form disclosed. While specific embodiments of, and examples for, the disclosure are described herein for illustrative purposes, various equivalent modifications are possible within the scope of the disclosure, as those skilled in the relevant art will recognize. For example, while method steps or functions are presented in a given order, alternative embodiments may perform functions in a different order, or functions may be performed substantially concurrently. The teachings of the disclosure provided herein can be applied to other procedures or methods as appropriate. The various embodiments described herein can be combined to provide further embodiments. Aspects of the disclosure can be modified, if necessary, to employ the compositions, functions and concepts of the above references and application to provide yet further embodiments of the disclosure. Moreover, due to biological functional equivalency considerations, some changes can be made in protein structure without affecting the biological or chemical action in kind or amount. These and other changes can be made to the disclosure in light of the detailed description. All such modifications are intended to be included within the scope of the appended claims.

[0286] Specific elements of any of the foregoing embodiments can be combined or substituted for elements in other embodiments. Furthermore, while advantages associated with certain embodiments of the disclosure have been described in the context of these embodiments, other embodiments may also exhibit such advantages, and not all embodiments need necessarily exhibit such advantages to fall within the scope of the disclosure.

[0287] The technology described herein is further illustrated by the following examples which in no way should be construed as being further limiting.

[0288] Some embodiments of the technology described herein can be defined according to any of the following numbered paragraphs:
[0289] 1. A method of producing male-sterile wheat which comprises during the development of the flower:
   [0290] analysing the RNA-transcriptome of wheat stamen cells;
   [0291] analysing the RNA-transcriptome of wheat pistil cells;
   [0292] then comparing the two RNA-transcriptomes to identify one or more genes that at the time of flowering are preferentially expressed in stamens rather than pistils;
   [0293] selecting one or more Mfw genes so identified;
   [0294] inhibiting expression of at least one selected Mfw gene, so as to produce male-sterile wheat.
[0295] 2. A method as paragraphed in paragraph 1 in which RNA-transcriptome analysis is carried out during meiosis.
[0296] 3. A method as paragraphed in paragraphs 1 or 2 in which RNA-transcriptome analysis is carried out between stages 41 to 49 of the Zadoks scale, inclusive.
[0297] 4. A method as paragraphed in any of paragraphs 1-3, wherein RNA-transcriptome analysis is carried out in juvenile flowers comprising both immature stamens and pistils.
[0298] 5. A method as paragraphed in any of paragraphs 1 to 4 in which a selected Mfw gene codes for an amino-acid sequence identical, or having corresponding function and least 60%, preferably at least 90% or 95% identity, with any of SEQ ID NOs 1-6 and/or SEQ ID NOs: 30-35 or a sequence of a gene of Tables 1 or 2.
[0299] 6. A method as paragraphed in any of paragraphs 1 to 5 in which the selected Mfw gene has the sequence shown in any of SEQ ID NOs 7-12, 36-41, and/or 129-130 or has at least 60%, preferably at least 90% or 95% identity therewith.
[0300] 7. The method as paragraphed in any of paragraphs 1-6, wherein the selected Mfw genes are at least two of Mfw1, Mfw2, Mfw3, and Mfw5.
[0301] 8. A method as paragraphed in any of paragraphs 1-67 in which the selected Mfw gene is deactivated by site-directed mutagenesis employing a site-specific nuclease.
[0302] 9. A method as paragraphed in paragraph 8 in which the site-specific nuclease is CRISPR-Cas.
[0303] 10. A method as paragraphed in either of paragraphs 8 or 9 in which the Mfw gene is deactivated by excision of at least part of a coding or regulatory sequence.
[0304] 11. A method as paragraphed in any of paragraphs 1-10 in which the selected Mfw gene is deactivated by inhibition by expression of RNAi.
[0305] 12. A method as paragraphed in any of paragraphs 1-7, wherein the selected Mfw gene is deactivated by non-transgenic mutagenesis.
[0306] 13. A wheat plant or seed that is male-sterile as a result of deactivation of one or more Mfw and/or Mpew genes.
[0307] 14. A population of wheat plants that is predominantly male-sterile as a result of deactivation of one or more Mfw and/or Mpew genes.
[0308] 15. A plant, seed, or population of wheat plants as paragraphed in paragraphs 13-14 in which one or more of the Mfw and/or Mpew genes deactivated is listed in Table 1 or Table 2.
[0309] 16. A plant, seed, or population of wheat plants as paragraphed in paragraph 13-15 in which one or more of the Mfw and/or Mpew genes deactivated code for an amino-acid sequence having at least 60%, preferably at least 90% or 95% identity with any of SEQ ID NOs 1-6 and/or 30-35.
[0310] 17. A population of wheat plants as paragraphed in any of paragraphs 13-16 that is at least 50%, preferably at least 90%, particularly 97% male-sterile.
[0311] 18. A population of wheat plants as paragraphed in any of paragraphs 13-17 that is at least 97% male-sterile.
[0312] 19. A population of wheat plants as paragraphed in any of paragraphs 13-18 which is substantially genetically uniform.
[0313] 20. A plant, seed, or population of any of paragraphs 13-19, wherein the one or more Mfw and/or Mpew genes are at least two of Mfw1, Mfw2, Mfw3, and Mfw5.
[0314] 21. A male-sterile wheat plant comprising deactivating modifications of each of the six copies of one or more Mfw and/or Mpew genes.
[0315] 22. The male-sterile wheat plant of paragraph 21, wherein the deactivating modification is identical across the three genomes.
[0316] 23. The male-sterile wheat plant of paragraph 21, wherein each genome comprises a different deactivating modification.
[0317] 24. The male-sterile wheat plant of any of paragraphs 21-23, wherein one or more of the Mfw and/or Mpew genes deactivated is listed in Table 1 or Table 2.
[0318] 25. The male-sterile wheat plant of any of paragraphs 21-24, wherein one or more of the Mfw and/or Mpew genes code for an amino-acid sequence having at least 60%, preferably at least 90% or 95% identity with any of SEQ ID NOs 1-6 and/or 30-35.
[0319] 26. The male-sterile wheat plant of any of paragraphs 21-25, wherein the Mfw and/or Mpew gene is Mfw1, Mfw2, Mfw3, or Mfw 5.
[0320] 27. The male-sterile wheat plant of any of paragraphs 21-26, wherein the one or more Mfw and/or Mpew gene is at least two of Mfw1, Mfw2, Mfw3, or Mfw5.
[0321] 28. A hybrid wheat plant and/or seed comprising at least one deactivated copy of a Mfw and/or Mpew gene and at least one wild-type copy of the same Mfw and/or Mpew gene.
[0322] 29. A population of hybrid wheat plants comprising at least one deactivated copy of a Mfw and/or Mpew gene and at least one wild-type copy of the same Mfw and/or Mpew gene.
[0323] 30. The plant, seed, or population of any of paragraphs 28-29, wherein the one or more Mfw and/or Mpew genes are at least two of Mfw1, Mfw2, Mfw3, and Mfw5.
[0324] 31. The plant, seed, or population of any of paragraphs 13-30, wherein the deactivating modification is a site-directed mutagenic event resulting from the activity of a site-specific nuclease; or the at least one Mfw and/or Mpew gene is deactivated by site-directed mutagenesis resulting from the activity of a site-specific nuclease.
[0325] 32. The plant, seed, or population of paragraph 31, wherein the site-specific nuclease is CRISPR-Cas.
[0326] 33. The plant, seed, or population of any of paragraphs 13-30, wherein
   [0327] the deactivating modification is excision of at least part of a coding or regulatory sequence; or
   [0328] the at least one Mfw and/or Mpew gene is deactivated by excision of at least part of a coding or regulatory sequence.
[0329] 34. The plant, seed, or population of any of paragraphs 13-30, wherein the deactivating modification is insertion of RNAi-encoding sequences; or the at least one Mfw and/or Mpew gene is deactivated by inhibition by expression of RNAi.
[0330] 35. The plant, seed, or population of any of paragraphs 13-30, wherein
   [0331] the deactivating modification is non-transgenic mutagenesis; or
   [0332] the at least one Mfw and/or Mpew gene is deactivated by non-transgenic mutagenesis.
[0333] 36. A process of obtaining wheat hybrids which comprises crossing a wheat plant or population of wheat plants paragraphed in any of paragraphs 13-35 with male-fertile wheat.
[0334] 37. A process paragraphed in paragraph 36 which comprises crossing a population paragraphed in any of paragraphs 13-35 with a uniform population of male-fertile wheat.
[0335] 38. Hybrids produced by the process of either of paragraphs 36 or 37.
[0336] 39. A plant, seed, or population of wheat plants comprising: a) a deactivating modification of each nuclear copy of one or more Mfw and/or Mpew genes; and
   [0337] b) a nucleic acid encoding an exogenous wild-type sequence of at least one of the Mfw and/or Mpew genes, wherein the nucleic acid is located in the cytoplasmic genome.
[0338] 40. A plant, seed, or population of wheat plants comprising:
   [0339] a. a deactivating modification of each nuclear copy of one or more Mfw and/or Mpew genes; and
   [0340] b. a Mfw/PD/HT construct;
   [0341] wherein the Mfw/PD/HT construct is introgressed into the genome of the plant, seed, or population of plants; and
   [0342] whereby the plant, seed, or population of plants can pollinate a male-sterile plant comprising the deactivating modifications of clause a., but not the construct of clause
   [0343] b., resulting in male-sterile seed and/or progeny plants which are isogenic with the male-sterile plant.
[0344] 41. The plant, seed, or population of wheat plants of any of paragraphs 39-40, wherein the one or more Mfw and/or Mpew genes are at least two of Mfw1, Mfw2, Mfw3, and Mfw 5.
[0345] 42. The plant, seed, or population of wheat plants of any of paragraphs 39-41, further comprising a selectable marker gene or selectable marker construct.

### EXAMPLES

### Example 1

[0346] mRNAseq (as described in Trapnell et al., 2011) was used on wheat. The objective is to produce a set of ESTs (expressed sequence tags) from the RNA seq reads to discover genes expressed during flower development. This set of ESTs will contain both full length and fragments of genes. Arranging matching overlaps (using suitable software) allows the coding sequences of (most or all of) the expressed genes to be deduced.

[0347] Material was collected from stamens and pistils of immature flowers (at or around the time of meiosis and gamete development) and RNA was extracted from each tissue type.

[0348] Total RNA was extracted from three biologically replicated samples of developing stamens and pistils of wheat (Triticum aestivum) plants, cultivar Fielder. Tissues were selected and dissected from wheat ears between the Zadok stages 41-49 and total RNA was isolated using Qiagen's RNeasy® kit. Samples were then treated with DNAse to remove any further genomic contamination and purified using RNeasy Minelute® columns. Six RNA Seq libraries (three from stamens and three from pistils) were generated and sequenced using an Illumina HiSeq 2500 150 base pair paired end reads. These cDNA libraries were treated with the enzyme Ribo Zero (Illumina) to reduce the abundance of ribosomal RNAs before the libraries were run on the Illumina HiSeq2500. Sequencing was performed by Eurofins Genomics.

[0349] Obtained reads from the six libraries were analyzed using the bioinformatics software tool ‘fastQC’ to identify adapter contamination (available on the world wide web at bioinformatics.babraham.ac.uk/projects/fastqc/). Adapter contamination was removed from the reads using the ‘cutadapt’ software and trimmed sequences were again run through fastQC to assure adapters had been removed. Trimmed reads were aligned to the Chapman et al. Genome release using the ‘cufflinks’ suite of bioinformatics tools to determine differences in expression of genes between the two tissue types (Trapnell et al., 2011). Differentially expressed transcripts were run through ‘Blast2GO’ (bioinformatics platform) for a reference annotation (Conesa, et al., 2005).

[0350] A reference transcriptome was built using ‘cufflinks’ to allow the identification of candidate genes.

[0351] Sequencing results were compared to released wheat sequences as given in Chapman et al (2014) and TGAC genomes to understand gene models and fill any gaps in sequence knowledge (downloadable from The Genome Analysis Centre, Norwich, January 2016, ensemblgenomes.org/pub/plants/pre/fasta/triticum_aestivum/dna/). The sequences provided in Clavijo et al, (2016) can also be used in a similar fashion.

[0352] As noted above, wheat has an estimated 104,000 protein-coding genes, see Clavijo et al, (2016). The transcriptome analysis of this Example gave 8471 genes or gene fragments differentially expressed in the immature pistils or stamens analysed. Of these, 6668 were expressed higher in the stamen tissues: 6149 genes or gene fragments were expressed in the stamen only; 519 were expressed in the stamen and pistil with the stamen expression being higher than the pistil expression by factors ranging from 133 (102.29 Fragments Per Kilobase of transcript per Million [FPKM] in the stamen compared to 0.7657 FPKM in the pistil) to 8.6 (8.7895 FPKM in the stamen to 1.024 in the pistil).

[0353] The 6668 genes and gene fragments expressing in the stamens were then aligned to the TGAC genome released in January 2016 to validate their sequence (eliminating or combining gene fragments into single genes) and find their locus (including which chromosome) and show which of these genes have homology with genes found and described in other species. Genes having homology with genes from other species previously described as being involved with pollen development were selected for further analysis. This further analysis was based on i) degree of confidence in inferring function of the genes (based on their sequence available, their level of conserved sequence [at least 45% similarity] in comparison with putatively homologous genes in other plant species and a demonstrated link with male-fertility. in such other species) and ii) evidence of homoeologous copies in at least two, preferably three out of the three wheat genomes. This analysis and structured selection process gave a number of genes as candidates for further test. These are shown in Table 1 and Table 2.

TABLE 1

| | Cross | | | | | |
|---|---|---|---|---|---|---|
| Assigned | reference | | | Pistil | Stamen | |
| Mfwname | to Table 2 | Blast hit | Associated transcript | expression | expression | Homoeologues |
| Mfw1-D | a | RPG1 (RUPTURED POLLEN | Traes_7DL_015FBEE0C.1 | 0 | 5.8181 | Traes_7AL_F9E72D016.1 |
| | | GRAIN1) like | | | | Traes_7BL_784EA335F.1 |
| Mwf4-D | b | RPG1 (RUPTURED POLLEN | Traes_5DS_17EB80BAC.1 | 0 | 3.354 | Traes_5AS_2BDDAC590.2 |
| | | GRAIN1) like | | | | Traes_5BS_33597360E.1 |
| Mfw3-B | c | Aborted microspore 1 like | Traes_6AS_884A8FA55 | 0.666759 | 22.5582 | Traes_6BS_63C2E4C75 |
| Mfw3-A | d | Aborted microspore 1 like | Traes_6BS_63C2E4C75 | 0.994102 | 44.3336 | Traes_6AS_884A8FA55 |
| Mfw5-A | e | bHLH91 | Traes_2AL_FAB4B4A20 | 0.305494 | 12.6531 | Traes_2BL_1DDA22EA3 |
| | | | | | | Traes_2DL_9DD224B48 |
| Mfw5-D | f | bHLH91 | Traes_2DL_9DD224B48 | 1.35188 | 18.6834 | Traes_2BL_D3FAA4D64 |
| | | | | | | Traes_2AL_6FC5F1FD0 |
| Mfw2-B | g | callose synthase 5 | Traes_7BS_170A2F4BB.1 | 0 | 724.068 | Traes_7AS_AC78A59B0.2 |
| | | | | | | Traes_7DS_3B08482C9.1 |
| Mfw2-B | h | callose synthase 5 | Traes_7BS_170A2F4BB.1 | 0 | 14.3366 | Traes_7AS_AC78A59B0.2 |
| | | | | | | Traes_7DS_3B08482C9.1 |
| Mfw2-D | i | callose synthase 5 | Traes_7DS_674C1055E.2 | 0 | 36.152 | Traes_7BS_170A2F4BB.1 |
| | | | | | | Traes 7AS AC78A59B0.2 |
| Mfw2-B | j | callose synthase 5 like | Traes_7BS_170A2F4BB.1 | 0 | 2.04192 | Traes_7AS_AC78A59B0.2 |
| | | | | | | Traes_7DS_3B08482C9.1 |
| Mfw2-B | k | callose synthase 5 like | Traes_7DS_674C1055E.2 | 0 | 2.10844 | Traes_7BS_170A2F4BB.l |
| | | | | | | Traes 7AS AC78A59B0.2 |
| Mfw6-A | l | GAMYB (AtMYB101) | Traes_6AS_5562B97F7 | 1.17948 | 53.1065 | Traes_6DS_A0EC5D808.1 |
| Mfw6-A | m | GAMYB (AtMYB101) | Traes_6AS_5562B97F7.1 | 0 | 1.188 | Traes_6DS_A0EC5D808.1 |
| Mfw6-D | n | GAMYB (AtMYB101) | Traes_6DS_A0EC5D808.1 | 0 | 1.8778 | Traes_6AS_5562B97F7.1 |
| Mfw6-D | o | GAMYB (AtMYB101) | Traes_6DS_A0EC5D808.1 | 0 | 5.26915 | Traes_6AS_5562B97F7.1 |
| Mfw6-D | p | Hothead | Traes_1DL_4C479DE73 | 1.68379 | 54.1902 | Traes_1BL_CF9A1EAC4 |
| | | | | | | Traes_1AL_E0F69742D |
| Mfw7-B | q | Hothead | Traes_4BL_96CA397DA | 0.181023 | 24.1233 | Traes_4DL_1049A91B7 |
| Mfw7-B | r | Hothead | Traes_4BL_96CA397DA | 0.204306 | 27.0504 | Traes_4DL_0A4D9B04E |
| Mfw7-D | s | Hothead | Traes_4DL_1049A91B7 | 0 | 6.95578 | Traes_4BL_96CA397DA |
| Mfw8-D | t | Hothead | Traes_6DL_0CA2DAF56 | 0 | 296.701 | no strong hit |
| Mfw9-B | u | member of the sweet family | Traes_2BS_E686AA452.1 | 0 | 19.5814 | Traes_2DS_0F3296166 |
| Mfw10-A | v | member of the sweet family | Traes_7AS_43647E27C.1 | 1.63664 | 17.2441 | Traes_7BS_D48ECD082.1 |
| | | | | | | Traes_7DS_F2ACF99D2.1 |
| Mfw11-B | w | Similar to OsSweet7e | Traes_5BL_DE3 86929C.1 | 0 | 0.959594 | no strong hit |
| Mfw12-D | x | Sweet4 | Traes_1DL_9AC3057FA.1 | 0 | 4.17944 | Traes_1AL_D06B0BF4E.1 |
| Mfw1-A | y | RPG1 (RUPTURED POLLEN | Traes_7AL_F9E72D016.1 | 0 | 0.323 | Traes_7BL_784EA335F.1; |
| | | GRAIN1) like | | | | Traes_7DL_015FBEE0C.1 |
| Mfw1-B | z | RPG1 (RUPTURED POLLEN | Traes_7BL_784EA335F.1 | 0 | 0.110322 | Traes_7BL_784EA335F.1; |
| | | GRAIN1) like | | | | Traes_7DL_015FBEE0C.1 |
| Mfw2-A | aa | callose synthase 5 (see. e.g., | Traes_7AS_AC78A59B0.2 | 0.471962 | 12.939 | Traes_7BS_170A2F4BB.1; |
| | | SEQ ID NOs 4, 10, 14) | | | | Traes_7DS_674C1055E.2 |
| Mfw3-D | ab | Aborted microspore 1 like | not in IWGSC v 26 | 0.608498 | 12.285 | Traes_6AS_884A8FA55; |
| | | | | | | Traes_6BS_63C2E4C75 |
| Mfw5-B | ac | bHLH91 | not in IWGSC v 26 | 1.75714 | 18.2507 | Traes_2AL_FAB4B4A20; |
| | | | | | | Traes_2DL_9DD224B48 |

TABLE 2

| | Table 1 | | | | TGAC v1 gene model* - the closest match on a |
|---|---|---|---|---|---|
| Assigned | Cross- | Pistil | Stamen | | particular genome for the sequence/contig we built |
| Mfw name | reference | expression | expression | Blast hit | using our RNA data |
| Mfw1-A | y | 0 | 0.323 | RPG1 | TRIAE_CS42_7AL_TGACv1_556969_AA1774370 |
| | | | | (RUPTURED | |
| | | | | POLLEN | |
| | | | | GRAIN1) like | |
| Mfw1-B | z | 0 | 0.110322 | RPG1 | TRIAE_CS42_7BL_TGACv1_580455_AA1914070 |
| | | | | (RUPTURED | |
| | | | | POLLEN | |
| | | | | GRAIN1) like | |
| Mfw1-D | a | 0 | 5.8181 | RPG1 | TRIAE_CS42_7DL_TGACv1_603435_AA1983700 |
| | | | | (RUPTURED | |
| | | | | POLLEN | |
| | | | | GRAIN1) like | |
| Mfw2-A | aa | 0.471962 | 12.939 | callose | TRIAE_CS42_7AS_TGACv1_569258_AA1811650 |
| | | | | synthase 5 | |
| Mfw2-B | g | 0 | 724.068 | callose | TRIAE_CS42_7BS_TGACv1_593715_AA1953990 |
| | | | | synthase 5 | |
| ″ | h | 0 | 14.3366 | callose | ″ |
| | | | | synthase 5 | |
| ″ | j | 0 | 2.04192 | callose | ″ |
| | | | | synthase 5 | |
| ″ | k | 0 | 2.10844 | callose | ″ |
| | | | | synthase 5 | |
| Mfw2-D | i | 0 | 36.152 | callose | TRIAE_CS42_7DS_TGACv1_622598_AA2042310 |
| | | | | synthase 5 | |
| Mfw3-A | d | 0.994102 | 44.3336 | Aborted | TRIAE_CS42_6AS_TGACv1_486918_AA1566480 |
| | | | | microspore 1 | |
| | | | | like | |
| Mfw3-B | c | 0.666759 | 22.5582 | Aborted | TRIAE_CS42_6BS_TGACv1_514404_AA1659330 |
| | | | | microspore 1 | |
| | | | | like | |
| Mfw3-D | ab | 0.608498 | 12.285 | Aborted | TRIAE_CS42_U_TGACv1_643846_AA2135420 |
| | | | | microspore 1 | |
| | | | | like | |
| Mfw4-D | b | 0 | 3.354 | RPG1 | TRIAE_CS42_5BS_TGACv1_423307_AA1373980; |
| | | | | (RUPTURED | |
| | | | | POLLEN | |
| | | | | GRAIN1) like | |
| Mfw5-A | e | 0.305494 | 12.6531 | bHLH91 | TRIAE_CS42_2AL_TGACv1_094707_AA0301850 |
| Mfw5-B | ac | 1.75714 | 18.2507 | bHLH91 | TRIAE_CS42_2BL_TGACv1_129925_AA0399500 |
| Mfw5-D | f | 1.35188 | 18.6834 | bHLH91 | TRIAE_CS42_2DL_TGACv1_158620_AA0523420 |
| Mfw6-A | l | 1.17948 | 53.1065 | GAMYB | TRIAE_CS42_6AS_TGACv1_485682_AA1550030 |
| | | | | (AtMYB101) | |
| ″ | m | 0 | 1.188 | GAMYB | ″ |
| | | | | (AtMYB101) | |
| Mfw6-D | n | 0 | 1.8778 | GAMYB | TRIAE_CS42_6DS_TGACv1_543879_AA1744870 |
| | | | | (AtMYB101) | |
| ″ | o | 0 | 5.26915 | GAMYB | ″ |
| | | | | (AtMYB101) | |
| Mfw7-B | q | 0.181023 | 24.1233 | Hothead | TRIAE_CS42_4BL_TGACv1_320326_AA1035360 |
| ″ | r | 0.204306 | 27.0504 | ″ | ″ |
| Mfw7-D | s | 0 | 6.95578 | Hothead | TRIAE_CS42_4DL_TGACv1_343496_AA1135340 |
| Mfw8-D | t | 0 | 296.701 | Hothead | TRIAE_CS42_6DL_TGACv1_527115_AA1698830 |
| Mfw9-B | u | 0 | 19.5814 | member of the | TRIAE_CS42_2DS_TGACv1_177708_AA0582810 |
| | | | | sweet family | |
| Mfw10-A | v | 1.63664 | 17.2441 | member of the | TRIAE_CS42_7AS_TGACv1_570345_AA1834200 |
| | | | | sweet family | |
| Mfw11-B | w | 0 | 0.959594 | Similar to | TRIAE_CS42_U_TGACv1_640821_AA2075730 |
| | | | | OsSweet7e | |
| Mfw12-D | x | 0 | 4.17944 | Sweet4 | TRIAE_CS42_1DL_TGACv1_065128_AA0236610 |
| Mfw13-D | p | 1.68379 | 54.1902 | Hothead | TRIAE_CS42_1DL_TGACv1_063432_AA0227210 |

| Assigned | TGAC v1 homoeologues* - the copies on the other sub |
|---|---|
| Mfw name | genomes of wheat and their associated gene models |
| Mfw1-A | TRIAE_CS42_7BL_TGACv1_580455_AA1914070; |
| | TRIAE_CS42_7DL_TGACv1_603435_AA1983700 |
| Mfw1-B | TRIAE_CS42_7AL_TGACv1_556969_AA1774370; |
| | TRIAE_CS42_7DL_TGACv1_603435_AA1983700 |
| Mfw1-D | TRIAE_CS42_7AL_TGACv1_556969_AA1774370; |
| | TRIAE_CS42_7BL_TGACv1_580455_AA1914070 |
| Mfw2-A | TRIAE_CS42_7BS_TGACv1_593715_AA1953990; |
| | TRIAE_CS42_7DS_TGACv1_622598_AA2042310 |
| Mfw2-B | TRIAE_CS42_7AS_TGACv1_569258_AA1811650; |
| | TRIAE_CS42_7DS_TGACv1_622598_AA2042310 |
| ″ | TRIAE_CS42_7AS_TGACv1_569258_AA1811650; |
| | TRIAE_CS42_7DS_TGACv1_622598_AA2042310 |
| ″ | TRIAE_CS42_7AS_TGACv1_569258_AA1811650; |
| | TRIAE_CS42_7DS_TGACv1_622598_AA2042310 |
| ″ | TRIAE_CS42_7AS_TGACv1_569258_AA1811650; |
| | TRIAE_CS42_7DS_TGACv1_622598_AA2042310 |
| Mfw2-D | TRIAE_CS42_7BS_TGACv1_593715_AA1953990; |
| | TRIAE_CS42_7AS_TGACv1_569258_AA181165 |
| Mfw3-A | TRIAE_CS42_6BS_TGACv1_514404_AA1659330; |
| | TRIAE_CS42_U_TGACv1_643846_AA2135420 |
| Mfw3-B | TRIAE_CS42_6AS_TGACv1_486918_AA1566480; |
| | TRIAE_CS42_U_TGACv1_643846_AA2135420 |
| Mfw3-D | TRIAE_CS42_6AS_TGACv1_486918_AA1566480; |
| | TRIAE_CS42_6BS_TGACv1_514404_AA1659330 |
| Mfw4-D | TRIAE_CS42_5AS_TGACv1_393366_AA1271880; |
| | TRIAE_CS42_5DS_TGACv1_457788_AA1489840 |
| Mfw5-A | TRIAE_CS42_2BL_TGACv1_129925_AA0399500; |
| | TRIAE_CS42_2DL_TGACv1_158620_AA0523420 |
| Mfw5-B | TRIAE_CS42_2AL_TGACv1_094707_AA0301850; |
| | TRIAE_CS42_2DL_TGACv1_158620_AA0523420 |
| Mfw5-D | TRIAE_CS42_2AL_TGACv1_094707_AA0301850; |
| | TRIAE_CS42_2BL_TGACv1_129925_AA0399500 |
| Mfw6-A | TRIAE_CS42_6DS_TGACv1_543879_AA1744870 |
| ″ | ″ |
| Mfw6-D | TRIAE_CS42_6AS_TGACv1_485682_AA1550030 |
| ″ | ″ |
| Mfw7-B | TRIAE_CS42_4DL_TGACv1_343496_AA1135340; |
| | TRIAE_CS42_5AL_TGACv1_375593_AA1224180 |
| ″ | TRIAE_CS42_4DL_TGACv1_343496_AA1135340; |
| | TRIAE_CS42_5AL_TGACv1_375593_AA1224180 |
| Mfw7-D | TRIAE_CS42_4BL_TGACv1_320326_AA1035360; |
| | TRIAE_CS42_5AL_TGACv1_375593_AA1224180 |
| Mfw8-D | TRIAE_CS42_6AL_TGACv1_470984_AA1500160; |
| | TRIAE_CS42_6BL_TGACv1_500863_AA1610910 |
| Mfw9-B | TRIAE_CS42_2AS_TGACv1_113352_AA0354890; |
| | TRIAE_CS42_2BS_TGACv1_149844_AA0497680 |
| Mfw10-A | TRIAE_CS42_7BS_TGACv1_591914_AA1925470 |
| Mfw11-B | no strong hit |
| Mfw12-D | TRIAE_CS42_1AL_TGACv1_002319_AA0040790; |
| | TRIAE_CS42_1BL_TGACv1_030610_AA0095680 |
| Mfw13-D | TRIAE_CS42_1AL_TGACv1_001690_AA0034080; |
| | TRIAE_CS42_1BL_TGACv1_032570_AA0131570 |

*Clavijo et al (2016) and associated public access wheat genome database
**In the event of a conflict of gene designations, the Mfw names assigned in Table 2 will be controlling.

[0354] Further explanation of the headings in Table 1
[0355] ‘Blast hits’—Best DNA sequence hit found with the BLAST2GO program
[0356] ‘Associated transcript’—Refers to the best associated gene model aligned to the IWGSC genome. The name given in the column may be located online at plants.ensembiorg/Triticum_aestivum/Transcript/ . . . Version 28
[0357] Pistil expression and Stamen expression—given in FPKM units
[0358] Homoeologues—Under this heading are listed the best predictions of the homoeologues on the other genomes of wheat and their associated gene model using the IWGSC (International Wheat Genome Sequencing Consortium) models.

[0359] Table 1 references sequence information available on the world-wide web from the International Wheat Genome Sequencing Consortium's database, whereas Table 2 presents sequence information available on the world-wide web from The Genome Analysis Centre's database (Clavijo et al, 2016). The genes in Tables 1 and 2 are cross-referenced for clarity.

[0360] Of the genes in Tables 1 and 2, six (Mfw1-A, Mfw1-B, Mfw1-D, Mfw2-A, Mfw2-B and Mfw2-D) were chosen for RNAi knockout in Example 2.

[0361] Genes of interest were identified where expression is high in stamens and low or undetectable in pistils. The genes selected and specifically identified in this patent had the following expression levels: Mfw1-A, Stamen 2.36796.FPKM, Pistil 0.016006.FPKM; Mfw1-B, Stamen 3.15965.FPKM, Pistil 0.132269.FPKM; Mfw1-D Stamen 5.8181.FPKM, Pistil 0.FPKM; Mfw2-A Stamen 16.2411.FPKM, Pistil 0.362906.FPKM; Mfw2-B Stamen 724.068.FPKM, Pistil 0 FPKM; Mfw2-D Stamen 36.152.FPKM, Pistil 0.FPKM. No genes were selected which had expression only or predominantly in the pistil.

### Example 2

[0362] To produce a construct that would inhibit expression of two genes required for male fertility in wheat, a hairpin molecule was designed to target six of the Mfw genes identified in Example 1 above, and to inhibit them by RNAi. The hairpin molecule is formed from two targeting sequences joined end to end, as shown in SEQ ID NO 19. This chimeric sequence comprises 450 bp from the coding sequence for Mfw1-A (bases 1 to 450 as shown in SEQ ID NO 7 linked to 450 bp from the sequence for Mfw2-A (bases 1169 to 1619 as shown in SEQ ID NO 10). To generate inhibiting RNAi, the chimeric SEQ ID NO 19 is inserted in a construct in two copies, one 5′-3′ and one 3′-5′, separated by an intron spacer (see FIG. 8). When transcribed, this construct forms a hairpin molecule in which the two chimeric sequences are the limbs of the hairpin and the intron spacer is the joining loop. This hairpin is then processed by the cell machinery to form inhibiting RNAi. The two halves of the chimeric sequence SEQ ID NO 19 match exactly part of the coding sequences of Mfw1-A and Mfw2-A, so inhibiting these genes. They are also sufficiently similar to the corresponding coding sequences of Mfw1-B,D and Mfw2-B,D so as at to inhibit expression of the latter as well. The construct devised in order to generate the SEQ ID NO 19 hairpin is an insert about 9,000 bases long, shown diagrammatically in FIGS. 7 and 8. FIG. 7 shows the first 3,800 bases of the construct, 5′ to 3′, including the left border, the Sc4 promoter for the selection gene at about 500 to 1,000 basepairs, the FAD intron at about 1,000 to 2,300 base pairs, and the nptII selection gene from around 2,300 to 3,200 base pairs. A terminator is included at 3,300 to 3,500 base pairs. FIG. 7 shows the remaining 5,200 bases of the construct, including the rice actin promoter (McElroy et al (1990)) at 4,000 to 4,700 base pairs and the actin intron at 4,900 to 5,300 base pairs. This is followed by the chimeric insert SEQ ID NO 19 (inserted 3′ to 5′), from 5,500 to 6,400 base pairs; the Os TUBL intron, as separator, from 6,400 to 7,300 base pairs and then the chimeric insert SEQ ID NO 19 (this time 5′ to 3′) from 7,300 to 8,200 base pairs, followed by a terminator sequence and the right border. This construct is transformed into wheat by the method described in Example 3 below.

### Example 3

[0363] Wheat transformation of Fielder spring wheat germplasm with the construct prepared in Example 2 was carried out using immature wheat embryos, following Ishida et al. (2015). Tissue culture steps using media and nptII selection and plantlet regeneration were carried out as in Risacher et al (2009). The resulting insert in the wheat genome generates an RNAi hairpin molecule that inhibits expression of one or more Mfw genes (Mfw1 and Mfw2) in the transformed plants. Transformed plants are then grown to seed and their fertility assessed by comparing their overall pollen viability with known male-fertile ‘Fielder’ wheat plants which express Mfw1 and Mfw2 normally.

[0364] Forty transgenic plants containing an RNAi construct as described above, e.g. targeting 450 bases of both Mfw1 and Mfw2 genes, were generated and grown to seed. Overall, plants containing the RNAi construct were similar to wild-type plants with no observable differences seen in traits such as height, flowering time, leaf angle or leaf number. To assess the pollen specific phenotypes, pollen samples were taken from three anthers of each plant and stained with Alexander stain to assess pollen viability. All 40 of the plants suggested viable pollen with the Alexander stain. However, pollen from plant 27 looked malformed and misshapen (FIGS. 17A-17J). Pollen from plant 27, which has 4 or more copies of the RNAi construct, was than stained with Auramine 0 to gain better distinction of the pollen. Pollen from two plants (9 and 27) showed abnormal pollen when stained with Auramine 0 (FIGS. 17A-17J). Pollen from these two plants were invaginated and deflated compared to well-filled spheres in the case of pollen from wild-type plants. Upon further analysis, flowers of these two plants were not pollinated (ie not self-pollinated) by the time of anther extrusion and appeared to be male sterile. Further examination of flowers from plants 9 and 27 showed normal female flower parts and crossing some of the flowers from plants 9 or 27 with wild-type pollen led to the formation of seeds; thus both plants were female-fertile. The flowers of plants 9 and 27 which were not hand-cross-pollinated remained unfertilized and developed no embryos or seed; thus they were completely male-sterile.

### Example 4

[0365] To produce plants with targeted mutations in Mfw1 and Mfw2 we used a CRISPR Cas system to introduce mutations in wheat plants. We targeted Mfw1 and Mfw2 with four guide RNAs for each set of homoeologues. To identify the target sequences in these genes we used the publicly available program DREG (available on the world wide web at emboss.sourceforge.net/apps/cvs/emboss/apps/dreg.html) to find sequences that match either ANNNNNNNNNNNNNNNNNNNNGG or GNNNNNNNNNNNNNNNNNNNNGG in both directions of the Fielder genomic sequence. We then selected four guides based on the following criteria: that the target sequence was conserved in all three homoeologues, that it was (at least partially) in an exon of Mfw1 or Mfw2, that it had a restriction enzyme site near the site of the protospacer associated motif (PAM) but in the sequence of the guide RNA and prioritized guides near the start of the coding sequences of each gene. We also sought to use both AN20GG and GN20GG as this would stabilize the construct for transformation in the plant. The guide sequences selected are shown as SEQ ID NOs: 22-29. For targeting Mfw2 (CalS5-like) we drove one guide by the OsU3, TaU3, TaU6 and OsU6 promoters for a total of four guides targeting Mfw2. For targeting Mfw1 (RPG1-like) we repeated the TaU6 promoter as we could not find a sequence in the Mfw1 gene that could fill all of our criteria for quality guides. These two promoter guides constructs were then synthesized by Genscript and subsequently cloned into an intermediate vector containing L1 L5r flanking sites for Gateway Multisite recombination (Petersen & Stowers, 2011) into the final binary vector containing a wheat-optimized Cas9 enzyme driven by the maize ubiquitin promoter flanked by L5 and L2 sites. This final vector was introduced into Agrobacterium for transformation into wheat using the method as described in Example 3. Plants were then screened for mutations using a PCR based method where the PCR product was digested with an appropriate enzyme previously identified to cut the DNA at a site near the PAM. PCR products which are not cut therefore contain a mutation induced by the CRISPR construct. If no restriction enzyme site existed in a region targeted (for example, Mfw2 Guide 3 below) then direct sequencing of the PCR product was used to determine if a mutation exists.

[0366] By way of non-limiting example, the following enzymes are suitable for use with the guide sequences described below herein:

| | Suitable Enzyme |
|---|---|
| Mfw1 Guide | |
| Guide 1 (SEQ ID NO: 22) | HpyAV |
| Guide 2 (SEQ ID NO: 23) | MbiI |
| Guide 3 (SEQ ID NO: 24) | AjII |
| Guide 4 (SEQ ID NO: 25) | Eco105I |
| Mfw2 Guide | |
| Guide 1 (SEQ ID NO: 26) | BpiI/BtsIMutI |
| Guide 2 (SEQ ID NO: 27) | MscI |
| Guide 3 (SEQ ID NO: 28) | |
| Guide 4 (SEQ ID NO: 29) | BglI |

[0367] Exemplary guide sequences are depicted within the context of SEQ ID NOs 20-21 below and are individually identified, in order, as SEQ ID NOs 22-29.

-Sequence for Mfw1 guides (guide targeting sequences
shown in bold (SEQ ID NOs: 22-25, in order))
SEQ ID NO: 20
CAAATAATGATTTTATTTTGACTGATAGTGACCTGTTCGTTGCAACAAATTGATG
AGCAATGCTTTTTTATAATGCCAAGTTTGTACAAAAAAGCAGGCTTTAACCGCGG
TATACAAGGAATCTTTAAACATACGAACAGATCACTTAAAGTTCTTCTGAAGCAA
CTTAAAGTTATCAGGCATGCATGGATCTTGGAGGAATCAGATGTGCAGTCAGGG
ACCATAGCACAAGACAGGCGTCTTCTACTGGTGCTACCAGCAAATGCTGGAAGC
CGGGAACACTGGGTACGTTGGAAACCACGTGATGTGAAGAAGTAAGATAAACTG
TAGGAGAAAAGCATTTCGTAGTGGGCCATGAAGCCTTTCAGGACATGTATTGCA
GTATGGGCCGGCCCATTACGCAATTGGACGACAACAAAGACTAGTATTAGTACC
ACCTCGGCTATCCACATAGATCAAAGCTGATTTAAAAGAGTTGTGCAGATGATCC
GTGGCATCGGGAATGTCATCTCCTTGTTTTAGAGCTAGAAATAGCAAGTTAAA
ATAAGGCTAGTCCGTTATCAACTTGAAAAAGTGGCACCGAGTCGGTGCTTTTTTT
TATAACTTAAGCCGCGGGTATACTTAATTAAATTGGATGATCTGATAATTAACCC
GGGGACCAAGCCCGTTATTCTGACAGTTCTGGTGCTCAACACATTTATATTTATC
AAGGAGCACATTGTTACTCACTGCTAGGAGGGAATCGAACTAGGAATATTGATC
AGAGGAACTACGAGAGAGCTGAAGATAACTGCCCTCTAGCTCTCACTGATCTGG
GTCGCATAGTGAGATGCAGCCCACGTGAGTTCAGCAACGGTCTAGCGCTGGGCT
TTTAGGCCCGCATGATCGGGCTTTTGTCGGGTGGTCGACGTGTTCACGATTGGGG
AGAGCAACGCAGCAGTTCCTCTTAGTTTAGTCCCACCTCGCCTGTCCAGCAGAGT
TCTGACCGGTTTATAAACTCGCTTGCTGCATCAGACTTGTACGTACCATGATGG
TGAGGTTTTAGAGCTAGAAATAGCAAGTTAAAATAAGGCTAGTCCGTTATCAAC
TTGAAAAAGTGGCACCGAGTCGGTGCTTTTTTTCCGCGGCACGTCTCGAGCCCGG
GTTAATTAAATTGGATGATGACTCTAGATAACGCAGAAGATTAATTAACCCGGG
GACCAAGCCCGTTATTCTGACAGTTCTGGTGCTCAACACATTTATATTTATCAAG
GAGCACATTGTTACTCACTGCTAGGAGGGAATCGAACTAGGAATATTGATCAGA
GGAACTACGAGAGAGCTGAAGATAACTGCCCTCTAGCTCTCACTGATCTGGGTC
GCATAGTGAGATGCAGCCCACGTGAGTTCAGCAACGGTCTAGCGCTGGGCTTTTA
GGCCCGCATGATCGGGCTTTTGTCGGGTGGTCGACGTGTTCACGATTGGGGAGAG
CAACGCAGCAGTTCCTCTTAGTTTAGTCCCACCTCGCCTGTCCAGCAGAGTTCTG
ACCGGTTTATAAACTCGCTTGCTGCATCAGACTTGATCATCAAGGCCAAGGACG
GTTTTAGAGCTAGAAATAGCAAGTTAAAATAAGGCTAGTCCGTTATCAACTTGAA
AAAGTGGCACCGAGTCGGTGCTTTTTTTCCGCGGCACGTCTCGAGCCCGGGTTAA
TTAAATTGGATGATGACTCTAGATAACGCAGGATCCACTAGTAACGGCCGCCAG
TGTGCTGGAATTGCCCTTGGATCATGAACCAACGGCCTGGCTGTATTTGGTGGTT
GTGTAGGGAGATGGGGAGAAGAAAAGCCCGATTCTCTTCGCTGTGATGGGCTGG
ATGCATGCGGGGGAGCGGGAGGCCCAAGTACGTGCACGGTGAGCGGCCCACAG
GGCGAGTGTGAGCGCGAGAGGCGGGAGGAACAGTTTAGTACCACATTGCCCAGC
TAACTCGAACGCGACCAACTTATAAACCCGCGCGCTGTCGCTTGTGTGGGGGAT
GGGGGCTTACGTAGTTTTAGAGCTAGAAATAGCAAGTTAAAATAAGGCTAGTC
CGTTATCAACTTGAAAAAGTGGCACCGAGTCGGTGCTTTTTTTGTCCCTTCGAAG
GGCAATTCTGCAGATATCCATCACACTGGCGGCCGCTCGAGGTCGAGGGTATCG
ATAAGCTTGAATTCGACCCAGCTTTCTTGTACAAAGTTGGCATTATAAAAAATAA
TTGCTCATCAATTTGTTGCAACGAACAGGTCACTATCAGTCAAAATAAAATCATT
ATTTG
-Sequence for Mfw2 guides (guide targeting sequences
shown in bold (SEQ ID NOs: 26-29 in order))
SEQ ID NO: 21
CAAATAATGATTTTATTTTGACTGATAGTGACCTGTTCGTTGCAACAAATTGATG
AGCAATGCTTTTTTATAATGCCAAGTTTGTACAAAAAAGCAGGCTTTAACCGCGG
TATACAAGGAATCTTTAAACATACGAACAGATCACTTAAAGTTCTTCTGAAGCAA
CTTAAAGTTATCAGGCATGCATGGATCTTGGAGGAATCAGATGTGCAGTCAGGG
ACCATAGCACAAGACAGGCGTCTTCTACTGGTGCTACCAGCAAATGCTGGAAGC
CGGGAACACTGGGTACGTTGGAAACCACGTGATGTGAAGAAGTAAGATAAACTG
TAGGAGAAAAGCATTTCGTAGTGGGCCATGAAGCCTTTCAGGACATGTATTGCA
GTATGGGCCGGCCCATTACGCAATTGGACGACAACAAAGACTAGTATTAGTACC
ACCTCGGCTATCCACATAGATCAAAGCTGATTTAAAAGAGTTGTGCAGATGATCC
GTGGCACACCTGATTGTTTCTCACTGTTTTAGAGCTAGAAATAGCAAGTTAAAA
TAAGGCTAGTCCGTTATCAACTTGAAAAAGTGGCACCGAGTCGGTGCTTTTTTTT
ATAACTTAAGCCGCGGGTATACTTAATTAAATTGGATGATCTGACTAGATACCGG
TCTCGAGTTAACATGAATCCAAACCACACGGAGTTCAAATTCCCACAGATTAAG
GCTCGTCCGTCGCACAAGGTAATGTGTGAATATTATATCTGTCGTGCAAAATTGC
CTGGCCTGCACAATTGCTGTTATAGTTGGCGGCAGGGAGAGTTTTAACATTGACT
AGCGTGCTGATAATTTGTGAGAAATAATAATTGACAAGTAGATACTGACATTTGA
GAAGAGCTTCTGAACTGTTATTAGTAACAAAAATGGAAAGCTGATGCACGGAAA
AAGGAAAGAAAAAGCCATACTTTTTTTTAGGTAGGAAAAGAAAAAGCCATACGA
GACTGATGTCTCTCAGATGGGCCGGGATCTGTCTATCTAGCAGGCAGCAGCCCTA
CCAACCTCACGGGCCAGCAATTACGAGTCCTTCTAAAACGTCCCGCCGAGGGCG
CGTGGCCGTGCTGTGCAGCAGCACGTCTAACATTAGTCCCACCTCGCCAGTTTAC
AGGGAGCAGAACCAGCTTATAAGCGGAGGCGCGGCACCAAGAAGCAACTTGCA
TCTAATGTGGCCGTTTTAGAGCTAGAAATAGCAAGTTAAAATAAGGCTAGTCCG
TTATCAACTTGAAAAAGTGGCACCGAGTCGGTGCCAACATTTTTTTTGTCCTTCTG
TTTTTTTAGTCAGTCTCTTTTTTCAGAAGTACAACATCTTTTTTTTGTCCTTCTGTT
TTTTTAGTCAGTCTTTTTTCAGAAGTACTCTATGTGATATCTTCGTTCTGGGAAAT
GTCTGTCTGTCTACAACCCATAATTATATTTGCAATCACACATCTAATATCTCTGT
GACAAGACAGCCGAACAACCTAGGTAAGATTAATTAACCCGGGGACCAAGCCCG
TTATTCTGACAGTTCTGGTGCTCAACACATTTATATTTATCAAGGAGCACATTGTT
ACTCACTGCTAGGAGGGAATCGAACTAGGAATATTGATCAGAGGAACTACGAGA
GAGCTGAAGATAACTGCCCTCTAGCTCTCACTGATCTGGGTCGCATAGTGAGATG
CAGCCCACGTGAGTTCAGCAACGGTCTAGCGCTGGGCTTTTAGGCCCGCATGATC
GGGCTTTTGTCGGGTGGTCGACGTGTTCACGATTGGGGAGAGCAACGCAGCAGT
TCCTCTTAGTTTAGTCCCACCTCGCCTGTCCAGCAGAGTTCTGACCGGTTTATAAA
CTCGCTTGCTGCATCAGACTTGGATGGCCAATGCGAGATGAGTTTTAGAGCTAG
AAATAGCAAGTTAAAATAAGGCTAGTCCGTTATCAACTTGAAAAAGTGGCACCG
AGTCGGTGCTTTTTTTCCGCGGCACGTCTCGAGCCCGGGTTAATTAAATTGGATG
ATGACTCTAGATAACGCAGGATCCACTAGTAACGGCCGCCAGTGTGCTGGAATT
GCCCTTGGATCATGAACCAACGGCCTGGCTGTATTTGGTGGTTGTGTAGGGAGAT
GGGGAGAAGAAAAGCCCGATTCTCTTCGCTGTGATGGGCTGGATGCATGCGGGG
GAGCGGGAGGCCCAAGTACGTGCACGGTGAGCGGCCCACAGGGCGAGTGTGAG
CGCGAGAGGCGGGAGGAACAGTTTAGTACCACATTGCCCAGCTAACTCGAACGC
GACCAACTTATAAACCCGCGCGCTGTCGCTTGTGTGATAGTAGTTAGTGCCGCG
TGTTTTAGAGCTAGAAATAGCAAGTTAAAATAAGGCTAGTCCGTTATCAACTTGA
AAAAGTGGCACCGAGTCGGTGCTTTTTTTGTCCCTTCGAAGGGCAATTCTGCAGA
TATCCATCACACTGGCGGCCGCTCGAGGTCGAGGGTATCGATAAGCTTGAATTCG
ACCCAGCTTTCTTGTACAAAGTTGGCATTATAAAAAATAATTGCTCATCAATTTG
TTGCAACGAACAGGTCACTATCAGTCAAAATAAAATCATTATTTG
SEQ ID NO: 22
TCGGGAATGTCATCTCCTT
SEQ ID NO: 23
TACGTACCATGATGGTGAG
SEQ ID NO: 24
ATCATCAAGGCCAAGGACG
SEQ ID NO: 25
GGGGATGGGGGCTTACGTA
SEQ ID NO: 26
CACCTGATTGTTTCTCACT
SEQ ID NO: 27
ACTTGCATCTAATGTGGCC
SEQ ID NO: 28
GATGGCCAATGCGAGATGA
SEQ ID NO: 29
ATAGTAGTTAGTGCCGCGT

[0368] The individual T₀ CRISPR-transformed plants had genomic DNA isolated from leaf tissue taken before flowering-time and this was analysed for both large deletions, smaller deletions, indels, or SNPs using the four restrictions enzyme sites designed into the guide. These enzymes include MbiI, AjiI and Eco105I for Mfw1 sequences and BpiI, MlsI or BglI for Mfw2. From the results of these assays, it was established which plants had missense mutations at any or all Mfw loci. The results were then considered to decide which plants had complementary deletions and such plants were cross-pollinated onto some but not all of the flowers of the relevant plants. In the case where all three loci or either Mfw1 or Mfw2 were mutated, apparently male-sterile flowers were crossed to wild-type pollen to ensure that the sterility was male sterility only and not complete sterility. Some flowers were left un-crossed to ensure that the pollinated flowers which appeared male-sterile at flowering were in fact male-sterile at maturity. Embryos were then excised from the fertilised flowers (reference for wheat embryo rescue needed here) to produce T₁ plantlets and, where embryos not taken, seed from the fertilised flowers was then sown in order to produce T₁ plants which were tested, using the same procedure as before, to find those which had combined significant deletions in all six homoeologous copies of the Mfw gene concerned. Those which did have such deletions and were male-sterile were cross-pollinated with others which were male-fertile but had the highest number of deletions. In such a way a population is produced which includes some males-steriles. With repetition of this process, further male-steriles can be produced until a separately-produced maintainer-line is established to effect larger-scale production of the male-sterile line.

### Example 5

[0369] A male-sterile wheat plant produced according to the method described in Example 4 is grown to flower maturity and fertilised with pollen of the wheat variety ‘Sadash’. Seed sets, and is collected from the plant. In this way is obtained a population consisting of fertile F₁ hybrid wheat seeds, substantially uniform in phenotypic expression, and typically displaying hybrid vigour.

### Example 6

[0370] To produce a construct that would inhibit expression of two genes required for male fertility in wheat, a hairpin molecule was designed to target six of the Min) genes identified in Example 1 above, and to inhibit them by RNAi. The hairpin molecule is formed from two targeting sequences joined end to end, as shown in SEQ ID NO 48. This chimeric sequence comprises 450 bp from the coding sequence for Mfw5-A (bases 207 to 656 as shown in SEQ ID NO 7 linked to 450 bp from the sequence for Mfw3-B (bases 100 to 549 as shown in SEQ ID NO 48). To generate inhibiting RNAi, the chimeric SEQ ID NO 48 is inserted in a construct in two copies, one 5c-3′ and one 3′-5′, separated by an intron spacer (see FIG. 8). When transcribed, this construct forms a hairpin molecule in which the two chimeric sequences are the limbs of the hairpin and the intron spacer is the joining loop. This hairpin is then processed by the cell machinery to form inhibiting RNAi. The two halves of the chimeric sequence SEQ ID NO 48 match exactly part of the coding sequences of Mfw5-A and Mfw3-B, so inhibiting these genes. They are also sufficiently similar to the corresponding coding sequences of Mfw5-B,D and Mfw3-A,D so as at to inhibit expression of the latter as well.

[0371] The construct devised in order to generate the SEQ ID NO 48 hairpin is an insert about 9,000 bases long. It follows the same plan used for the construct to generate the insert SEQ ID NO 19 in Examples 2 and 3. This plan is as shown diagrammatically in FIGS. 7 and 8. FIG. 7 shows the first 3,800 bases of the construct, 5′ to 3′, including the left border, the Sc4 promoter for the selection gene at about 500 to 1,000 basepairs, the FAD intron at about 1,000 to 2,300 basepairs, and the nptII selection gene from around 2,300 to 3,200 basepairs. A terminator is included at 3,300 to 3,500 basepairs. FIG. 7 shows the remaining 5,200 bases of the construct, including the rice actin promoter (McElroy et al (1990)) at 4,000 to 4,700 basepairs and the actin intron at 4,900 to 5,300 basepairs. This is followed by the chimeric insert SEQ ID NO 48 (inserted 3′ to 5′), from 5,500 to 6,400 basepairs; the OsTUBL intron, as separator, from 6,400 to 7,300 basepairs and then the chimeric insert SEQ ID NO 48 (this time 5′ to 3′) from 7,300 to 8,200 basepairs, followed by a terminator sequence and the right border. This construct is transformed into wheat by the method described in Example 7 below.

### Example 7

[0372] Wheat transformation of Fielder spring wheat germplasm with the construct prepared in Example 6 is carried out using immature wheat embryos, following Ishida et al. (2015), Tissue culture steps using media and nptII selection and plantlet regeneration is carried out as in Risacher et al (2009). The resulting insert in the wheat genome generates an RNAi hairpin molecule that inhibits expression of one or more Mfw genes (Mfw3 and Mfw5) in the transformed plants. Transformed plants are then grown to seed and their fertility assessed by comparing their overall pollen viability with known male-fertile ‘Fielder’ wheat plants which express Mfw3 and Mfw5 normally.

### REFERENCES

[0373] Belhaj et al., (2015), “Editing plant genomes with CRISPR/Cas9”, Current Opinion in Biotechnology, vol 32, pp 6-84
[0374] Belhaj et al. (2013): Plant genome editing made easy: targeted mutagenesis in model and crop plants using the CRISPR/Cas system. Plant Methods 2013 9:39;
[0375] Bogdanove et al. (2011) Science 333:1843-6;
[0376] Carlson D F, Tan W, Lillico S G, Stverakova D, Proudfoot C, Christian M. et al. Efficient TALEN-mediated gene knockout in livestock. Proc Natl Acad Sci USA. (2012); 109:17382-7. doi:10.1073/pnas.1211446109,
[0377] Carroll (2013). “Staying on target with CRISPR-Cas”. Nature Biotechnology. 31 (9), p 807-809
[0378] Chapman et al, (2015) “A whole genome shotgun approach for assembling and anchoring the hexaploid bread wheat genome”, Genome Biology, 16 (26), pp 1-17
[0379] Clavijo et al (2016) “An improved assembly and annotation of the allohexaploid wheat genome identifies complete families of agronomic genes and provides genomic evidence for chromosomal translocations,” Cold Spring Harbor Laboratory non-reviewed pre-print. doi:http://dx.doi.org/10.1101/080796.
[0380] Conesa et al., (2005) “Blast2GO: a universal tool for annotation, visualization and analysis in functional genomics research”, Bioinformatics, vol. 21, pp 3674-3676 Dong et al., (2005) “Callose synthase (CalS5) is required for exine formation during microgametogenesis and for pollen formation in Arabidopsis”, Plant Journal 42: 315-328
[0381] Guerts et al. (2009) Science 325:433-3;
[0382] Harrison et al., (2015) “Using RNA Sequencing and in Silico Subtraction to Identify Resistance Gene Analog Markers for Lr16 in Wheat”, The Plant Genome, vol. 8, no, 2. pp 1-9
[0383] Ishida et al, (2015), Agrobacterium Protocols: Volume 1, Methods in Molecular Biology, vol. 1223, pp 189-198. Springer,
[0384] Jinek et al. (2012) Science 337:816-821
[0385] Jing, Bing, Shuangping Heng, Dan Tong, Zhengjie Wan, Tingdong Fu, Jinxing Tu, Chaozhi Ma, Bin Yi, Jing Wen, and Jinxiong Shen. (2012). ‘A Male Sterility-Associated Cytotoxic Protein ORF288 in Brassica Juncea Causes Aborted Pollen Development’. Journal of Experimental Botany 63 (3): 1285-95. doi:10.1093/jxb/err355.
[0386] Kim and Kim. (2014) Nature Reviews Genetics 15:321-334;
[0387] Kim et al. (2012) Genome Res. 22:1327-1333;
[0388] McElroy et al., (1990) “Isolation of an Efficient Actin Promoter for Use in Rice Transformation”, The Plant Cell, Vol. 2, pp 163-171.
[0389] Petersen L K, Stowers R S (2011) A Gateway MultiSite Recombination Cloning Toolkit. PLoS ONE 6(9): e24531.doi: 10.1371/journal.pone.0024531
[0390] Ran et al. (2013) Cell 2013 154:1380-9;
[0391] Risacher et al., (2009) “Highly efficient Agrobacterium—mediated transformation of wheat via in planta inoculation” in Jones, H. and Shewry, P. (eds), Methods in Molecular Biology, Transgenic Wheat, Barley and Oats', vol. 478, p 115-124, Humana Press, Springer
[0392] Shan et al, (2014) “Protocol Genome editing in rice and wheat using the CRISPR/Cas system”, Nature Protocols, 9, pp. 2395-2410
[0393] Silva, George, Laurent Poirot, Roman Galetto, Julianne Smith, Guillermo Montoya, Philippe Duchateau, and Frederic Paques. (2011) ‘Meganucleases and Other Tools for Targeted Genome Engineering: Perspectives and Challenges for Gene Therapy’. Current Gene Therapy 11 (1): 11-27. doi:10.2174/156652311794520111.
[0394] Sun M-X et al., (2013) “Arabidopsis RPG1 is important for primexine deposition and functions redundantly with RPG2 for plant fertility at the late reproductive stage”, Plant Reprod 26:83-91 DOI 10.1007/s00497-012-0208-1
[0395] Takasu, Yoko, Isao Kobayashi, Kelly Beumer, Keiro Uchino, Hideki Sezutsu, Suresh Sajwan, Dana Carroll, Toshiki Tamura, and Michal Zurovec. (2010). ‘Targeted Mutagenesis in the Silkworm Bombyx Mori Using Zinc Finger Nuclease mRNA Injection’. Insect Biochemistry and Molecular Biology 40 (10): 759-65. doi:10.1016/j.ibmb.2010.07.012.
[0396] Trapnell et al, (2013) “Differential analysis of gene regulation at transcript resolution with RNA-seq”, Nature Biotechnology, 2013 January, 31(1), doi:10.1038/nbt.2450.
[0397] Trick et at, (2012), “Combining SNP discovery from next-generation sequencing data with bulked segregant analysis (BSA) to fine-map genes in polyploid wheat”, BMC Plant Biology 2012, 12:14
[0398] Urnov et al. (2010) Nat Rev Genet 2010 11:636-646
[0399] Watanabe et al. (2012) Nat. Commun. 3;
[0400] Whitford et al., (2013) “Hybrid breeding in wheat: technologies to improve hybrid wheat seed production”, Journal of Experimental Botany, doi: 10.1093/jxb/ert333, pp 1-18
[0401] Zadoks et al., (1974) “A Decimal Code for the Growth Stages of Cereals”, Weed Research 14:415-421.
[0402] Zhang, Chunsheng, Kim H. Norris-Caneda, William H. Rottmann, Jon E. Gulledge, Shujun Chang, Brian Yow-Hui Kwan, Anita M. Thomas, et al. (2012). ‘Control of Pollen-Mediated Gene Flow in Transgenic Trees[W][OA]’. Plant Physiology 159 (4): 1319-34. doi:10.1104/pp. 112.197228.

1. A method of producing male-sterile wheat which comprises during the development of the flower:
analysing the RNA-transcriptome of wheat stamen cells;
analysing the RNA-transcriptome of wheat pistil cells;
inhibiting expression of at least one Mfw gene which is preferentially expressed in stamens rather than pistils, so as to produce male-sterile wheat.

2. The method of claim 1, wherein the RNA-transcriptome analysis is carried out during meiosis.

3. The method of claim 1, wherein the RNA-transcriptome analysis is carried out between stages 41 to 49 of the Zadoks scale, inclusive.

4. The method of claim 1, wherein the RNA-transcriptome analysis is carried out in juvenile flowers comprising both immature stamens and pistils.

5. The method of claim 1, wherein the Mfw gene codes for an amino-acid sequence identical to, or having corresponding function and least 60%, with any of SEQ ID NOs 1-6, 7-12, 30-41, 129-130 or a sequence of a gene of Tables 1 or 2.

6. (canceled)

7. The method of claim 1, wherein the at least one Mfw genes are at least two of Mfw1, Mfw2, Mfw3, and Mfw5.

8. The method of claim 1, wherein the Mfw gene is deactivated by site-directed mutagenesis employing a site-specific nuclease.

9. The method of claim 8, wherein the site-specific nuclease is CRISPR-Cas.

10. The method of claim 1, wherein the Mfw gene is deactivated by excision of at least part of a coding or regulatory sequence, inhibition by expression of RNAi, or non-transgenic mutagenesis.

11. (canceled)

12. (canceled)

13. A wheat plant or seed that is male-sterile as a result of deactivation of one or more Mfw or Mpew genes.

14. (canceled)

15. The wheat plant or seed of claim 13, wherein one or more of the Mfw or Mpew genes deactivated is listed in Table 1 or Table 2 or codes for an amino acid sequence having at least 60% identity with any of SEQ ID NOs: 1-6 and 30-35.

16. (canceled)

17. (canceled)

18. (canceled)

19. (canceled)

20. The plant or seed of claim 13, wherein the one or more Mfw or Mpew genes are selected from Mfw1, Mfw2, Mfw3, and Mfw5.

21. The plant or seed of claim 13, comprising deactivating modifications of each of the six copies of the one or more Mfw and/or Mpew genes.

22. The wheat plant or seed of claim 21, wherein the deactivating modification is identical across the three genomes.

23. The wheat plant or seed of claim 21, wherein each genome comprises a different deactivating modification.

24. (canceled)

25. (canceled)

26. (canceled)

27. (canceled)

28. (canceled)

29. (canceled)

30. (canceled)

31. The wheat plant or seed of claim 13, wherein the deactivating modification is a site-directed mutagenic event resulting from the activity of a site-specific nuclease; or the at least one Mfw or Mpew gene is deactivated by site-directed mutagenesis resulting from the activity of a site-specific nuclease.

32. The wheat plant or seed of claim 31, wherein the site-specific nuclease is CRISPR-Cas.

33. The wheat plant or seed of claim 13, wherein
the deactivating modification is excision of at least part of a coding or regulatory sequence; or
the at least one Mfw or Mpew gene is deactivated by excision of at least part of a coding or regulatory sequence;
the deactivating modification is insertion of RNAi-encoding sequences; or
the at least one Mfw or Mpew gene is deactivated by inhibition by expression of RNAi;
the deactivating modification is non-transgenic mutagenesis; or
the at least one Mfw or Mpew gene is deactivated by non-transgenic mutagenesis.

34. (canceled)

35. (canceled)

36. (canceled)

37. (canceled)

38. (canceled)

39. A wheat plant or seed comprising:
a) a deactivating modification of each nuclear copy of one or more Mfw or Mpew genes; and
b) a nucleic acid encoding an exogenous wild-type sequence of at least one of the Mfw or Mpew genes, wherein the nucleic acid is located in the cytoplasmic genome.

40. (canceled)

41. The wheat plant or seed of claim 39, wherein the one or more Mfw or Mpew genes are at least two of Mfw1, Mfw2, Mfw3, Mfw5.

42. (canceled)

The application's sequence listing, which the Patent Office published only in electronic form, follows.

SEQUENCE LISTING (154 sequences)

SEQ ID NO: 1 - protein, 243 aa, Triticum aestivum
MVSADAARNVVGIIGNVISFGLFLSPTPVFWRIIKAKDVEEFKPDPYLATLLNCMLWVFYGLPIVHPNSILVVTINGIGLVIEGSYLIIFFLYSTNNKRLKMIGVLAAEAAFMVAVVLGVLLGAHTHEKRSMIVGILCVIFGTIMYASPLTIMGKVIKTKSVEYMPFTLSLVNFLNGCCWLAYALIKFDLYVTIPNGLGAFFGLMQLILYGCYYKRTPKEEKSVELPTSNPAGAGNVSVTVDR

SEQ ID NO: 2 - protein, 189 aa, Triticum aestivum
MLWVFYGLPIVHPNSILVVTINGIGLVIEGSYLIIFFLYSTNNKRLKMIGVLAAEAGFMVAVVLGVLLGAHTHEKRSMIVGILGVIFGTIMYASPLTIMGKVIKTKSVEYMPFTLSLVNFLNGCCWLAYALIKFDLYVTIPNGLGAFFGLMQLILYGCYYKRTPKEEKSVELPTSNPAGAGNVSVTVDR

SEQ ID NO: 3 - protein, 243 aa, Triticum aestivum; identical to SEQ ID NO: 1

SEQ ID NO: 4 - protein, 1709 aa, Triticum aestivum
MRWHTEVQEKKDIYAPFNILPLDAASASQSIMQLEEIKAAVAALRYTRGLTWPSAFEPERQKGGELDLLDWLRAMFGFQRDSVRNQREHLILLLANVHIRLEPKPEPLSKLDDRAVDVVMNKLFNNYKKWCKFLSRKHSLRNPPGAQLQEVQQRRILYLGLYLLIWGESANIRFMPECLCYIFHNMAYELHGLLAGNVSIVTGENIRPSYGGDEEAFLKKVVTPIYRVIRKEAGKSQHGKTAHSAWCNYDDLNEYFWTPDCFSLGWPMRDDGDFFKSVHDSRPVAVAGSSSPKGSSKGTGKTNFVETRSFWHIFRSFDRMWTFYLLALQAMLIFAWSEYSVTQILQKDLLYSLSSIFVTAAFLQFLQSILDFILNFPGHIRCKFIDVVRNILKIVVSAAWAVILPIFYISSQTKVNLPLKNLDRWFGYVKGVPQLYILAVAAYLIPNMISAMLFLFPMFRRWIESSDWHIVRLLLWWSQKRIYVGRGMHESQAALLKYTLFWILLLCAKLSFSYFVQIQPLIRPTKDIMSVHNIRYEWHEFFPNASYNIAAILSLWAPVLLVYLMDTQIWYAIFSTISGGNKGRNRRFSLVSPNKRTEAAKFAQLWNEVICSFRDEDFISDKEMDLLVVPYSSDPSLKLMQWPLFLLASKIPIALDMAAQFRPRDSDLWKRICADEYMKCAVIECYESFKLVLNLVVVGENEKRIIGIIIKEIEANIAKNTFLANFRMSALPVLCKKFVELVSTLKERDASKFDNVVLLLQDMLEVITRDMMVNEIKELAEFGHGNKDLVPRRQLFAGTGTKPAIVFPPPISAQWEEQIKRLYLLLTVKESAMDVPTNLEARRRISFFTNSLFMEMPRAPRVRKMLSFSVMTPYYSEETVYSRNDLDLENEDGVSIIFYLQKIFPDEWDNFMERIDCKRETEVWGNEENVLQLRHWASLRGQTLCRTVRGMMYYRKALKLQAFLDMASESEILEGYKAIADPAEEEKKSQRSLSSQLEAIADMKFTYVATCQIYGNQKQSGDRHATDILNLMVNYPGLRVAYIDEVEERDGEKVQKVFYSVLVKALDNHDQEIYRIKLPGPAKLGEGKPENQNHAIIFTRGEALQTIDMNQDNYLEEALKMRNLLEEFNENHGIRPPTILGVREHIFTGSVSSLAWFMSNQETSFVTIGQRVLANPLKVRFHYGHPDVFDRIFHITRGGISKASCGINLSEDIFAGFNSTLRRGNVTHHEYIQVGKGRDVGLNQISLFEAKVACGNGEQVLSRDIYRLGHRFDFFRMLSCYFTTVGFYVSSMMVVIIVYVFLYGRLYLALSGLEFAIMKQARMRGNRALEAAMGSQSIVQLGLLMALPMFMEIGLERGFRSALGDFIIMQLQLCAVFFTFSLGTKSHYFGRTILHGGAKYRATGRGFVVRHVKFAENYRMYSRSHFVKGLELMLLLVVYELYGDVATDSTAYVLLTSSMWFLVITWLFAPFLFNPSGFEWQKVVDDWDDWNKWISSRGGIGVPANKAWESWWEEEQEHLLSTGIIGRIWEIILSLRFFMFQYGIMYHLNISNGNKSISIYGLSWLVTVAVVLVLKVVSMGRKKFSADFQLMFRLLKLFLFIGSVGTLAILFTLLHLTVGDIFASFLAFAPTGWAILQISQASKPVVKAFGLWGSVKALSRGYEYLMGIVIFVPVAVLAWFPFVSEFQTRLLFNQAFSRGLQISRILAGG

SEQ ID NO: 5 - protein, 1906 aa, Triticum aestivum
MTAPRGGGDMPSSTASAAAAASTSEPNTPSSAHASGLNRRGSRGAAMASFSMEVFDNEVVPSSLSSIAPILRVAAEIEHERPRVAYLCRFYAFEKAHRLDQNSVGRGVRQFKTSLLQRLEKDNSPSLAKRLKKTDAREIESFYQEYYENYVRTLDKGEQADRTQLGKAYQTAGVLFEVLCAVNKNEKVEQVNPEIMRWHTEVQEKKDIYAPFNILPLDAASASQSIMQLEEIKAAVAALRYTRGLTWPSAFEPERQKGGELDLLDWLRAMFGFQRDSVRNQREHLILLLANVHIRLEPKPEPLSKLDDRAVDVVMNKLFNNYKKWCKFLSRKHSLRNPPGAQLQEVQQRRILYLGLYLLIWGESANIRFMPECLCYIFHNMAYELHGLLAGNVSIVTGENIRPSYGGDEEAFLKKVVTPIYRVIRKEAGKSQHGKTAHSAWCNYDDLNEYFWTPDCFSLGWPMRDDGDFFKSVHDSRPVAGSSSPKGSSKGTGKTNFVETRSFWHIFRSFDRMWTFYLLALQAMLIFAWSEYSVTQILQKDLLYSLSSIFVTAAFLQFLQSILDFILNFPGHIRCKFIDVVRNILKIVVSAAWAVILPIFYISSQTKVNLPLKNLDRWFGYVKGVPQLYILAVAVYLIPNMISATLFLFPMFRRWIESSDWHIVRLLLWWSQKRIYVGRGMHESQAALLKYTLFWILLLCAKLSFSYFVQIQPLIRPTKDIMSVHNIRYEWHEFFPNASYNIAAILSLWAPVLLVYLMDTQIWYAIFSTISGGMSGALGRLGEVSPNKRTEAAKFAQLWNEVICSFRDEDFISDKEMDLLVVPYSSDPSLKLMQWPLFLLASKIPIALDMAAQFRPRDSDLWRRICADEYMKCAVIECYESFKLVLNLVVVGENEKRIIGIIIKEIEANIAKNTFLANFRMSALPVLCKKFVELVSTLKERDASKFDNVVLLLQDMLEVITRDMMVNEIKELAEFGHGNKDLVPRRQLFAGTGTKPAIVFPPPISAQWEEQIKRLHLLLTVKESAMDVPTNLEARRRISFFTNSLFMEMPRAPRVRKMLSFSVMTPYYSEETVYSRNDLDLENEDGVSIIFYLQKIFPDEWDNFMERIDCKRETEVWGNEENVLQLRHWASLRGQTLCRTVRGMMYYRKALKLQAFLDMASESEILEGYKAIADPAEEEKKSQRSLSSQLEAIADMKFTYVATCQIYGNQKQSGDRHATDILNLMVNYPGLRVAYIDEVEERDGEKVQKVFYSVLVKALDNHDQEIYRIKLPGPAKLGEGKPENQNHAIIFTRGEALQTIDMNQDNYLEEALKMRNLLEEFNENHGIRPPTILGVREHIFTGSVSSLAWFMSNQETSFVTIGQRVLANPLKVRFHYGHPDVFDRIFHITRGGISKASCGINLSEDIFAGFNSTLRRGNVTHHEYIQVGKGRDVGLNQISLFEAKVACGNGEQVLSRDIYRLGHRFDFFRMLSCYFTTVGFYVSSMMVVIIVYVFLYGRLYLALSGLEFAIRKQARMRGNRALEAAMGSQSIVQLGLLMALPMFMEIGLERGFRSALGDFIIMQLQLCAVFFTFSLGTKSHYFGRTILHGGAKYRATGRGFVVRHVKFAENYRMYSRSHFVKGLELMLLLVVYELYGDVATDSTAYVLLTSSMWFLVITWLFAPFLFNPSGFEWQKVVDDWDDWNKWISSRGGIGVPANKAWESWWEEEQEHLLSTGIIGRIWEIILSLRFFMFQYGIMYHLNISNGNKSISIYGLSWLVIVAVVLILKVVSMGRKKFSADFQLMFRLLKLFLFIGSVGTLAILFTLLHLTVGDIFASFLAFVPTGWAILQISQASKPVVKALGLWGSVKALSRGYEYLMGIVIFVPVAVLAWFPFVSEFQTRLLFNQAFSRGLQISRILAGGKKQN

SEQ ID NO: 6 - protein, 1862 aa, Triticum aestivum
MASFSMEVFDNEVVPSSLSSIAPILRVAAEIEHERPRVAYLCRFYAFEKAHRLDQNSVGRGVRQFKTSLLQRLEKDNSPSLAKRLKKTDAREIESFYQEYYENYVRTLDKGEQADRTQLGKAYQTAGVLFEVLCAVNKNEKVEQVNPEIMRWHTEVQEKKDIYAPFNILPLDAASASQSIMQLEEIKAAVAALRYTRGLTWPSAFEPERQKGGELDLLDWLRAMFGFQRDSVRNQREHLILLLANVHIRLEPKPEPLSKLDDRAVDVVMNKLFNNYKKWCKFLSRKHSLRNPPGAQLQEVQQRRILYLGLYLLIWGESANIRFMPECLCYIFHNMAYELHGLLAGNVSIVTGENIRPSYGGDEEAFLKKVVTPIYRVIRKEAGKSQHGKTAHSAWCNYDDLNEYFWTPDCFSLGWPMRDDGDFFKSVHDSRPVAVAGSSSPKGSSKGTGKTNFVETRSFWHIFRSFDRMWTFYLLALQAMLIFAWSEYSVTQILQKDLLYSLSSIFVTAAFLQFLQSILDFILNFPGHIRCKFIDVVRNILKIVVSAAWAVILPIFYIRSQTKVNLPLKNLDRWFGYVKGVPQLYILAVAVYLIPNMISATLFLFPMFRRWIESSDWHIVRLLLWWSQKRIYVGRGMHESQAALLKYTLFWILLLCAKLSFSYFVQIQPLIRPTKDIMSVHNIRYEWHEFFPNASYNIAAILSLWAPVLLVYLMDTQIWYAIFSTISGGMSGALGRLGEVSPNKRTEAAKFAQLWNEVICSFRDEDFISDKEMDLLVVPYSSDPSLKLMQWPLFLLASKIPIALDMAAQFRPRDSDLWKRICADEYMKCAVIECYESFKLVLNLVVVGENEKRIIGIIIKEIEANIAKNTFLANFRMSALPVLCKKFVELVSTLKERDASKFDNVVLLLQDMLEVITRDMMVNEIKELAEFGHGNKDLVPRRQLFAGTGTKPAIVFPPPISAQWEEQIKRLYLLLTVKESAMDVPTNLEARRRISFFTNSLFMEMPRAPRVRKMLSFSVMTPYYSEETVYSRNDLDLENEDGVSIIFYLQKIFPDEWDNFMERIDCKKETEVWGNEENVLQLRHWASLRGQTLCRTVRGMMYYRKALKLQAFLDMASESEILEGYKAIADPAEEEKKSQRSLSSQLEAIADMKFTYVATCQIYGNQKQSGDRHATDILNLMVHYPGLRVAYIDEVEERDGEKVQKVFYSVLVKALDNHDQEIYRIKLPGPAKLGEGKPENQNHAIIFTRGEALQTIDMNQDNYLEEALKMRNLLEEFNENHGIRPPTILGVREHIFTGSVSSLAWFMSNQETSFVTIGQRVLANPLKVRFHYGHPDVFDRIFHITRGGISKASCGINLSEDIFAGFNSTLRRGNVTHHEYIQVGKGRDVGLNQISLFEAKVACGNGEQVLSRDIYRLGHRFDFFRMLSCYFTTVGFYVSSMMVVIIVYVFLYGRLYLALSGLEFAIMKQARMRGNRALEAAMGSQSIVQLGLLMALPMFMEIGLERGFRSALGDFIIMQLQLCAVFFTFSLGTKSHYFGRTILHGGAKYRATGRGFVVRHVKFAENYRMYSRSHFVKGLELMLLLVVYELYGDVATDSTAYVLLTSSMWFLVITWLFAPFLFNPSGFEWQKVVDDWDDWNKWISSRGGIGVPANKAWESWWEEEQEHLLSTGIIGRIWEIILSLRFFMFQYGIMYHLNISNGNKSISIYGLSWLVTVAVVLVLKVVSMGRKKFSADFQLMFRLLKLFLFIGSVGTLAILFTLLHLTVGDIFASFLAFAPTGWAILQISQASKPVVKAFGLWGSVKALSRGYEYLMGIVIFVPVAVLAWFPFVSEFQTRLLFNQAFSRGLQISRILAGGKKQN

SEQ ID NO: 7 - DNA, 732 bp, Triticum aestivum
atggtttccgctgacgcagctcgcaacgtcgtcggtatcatcgggaatgtcatctccttcggcctcttcctctcccctacgccggttttctggcggatcatcaaggccaaggacgtggaggagttcaagccggacccctacctggcgacgctgctcaactgcatgctctgggtcttctacggcctccccatcgtccaccccaacagcatcctcgtcgtcaccatcaatgggatcgggctcgtcatcgagggatcctacctcatcatcttcttcctctactccaccaacaacaagcggctgaagatgataggcgtgctcgccgccgaggcggcgttcatggtggccgtcgtgctaggcgtgctcctcggtgcccacacccacgagaagcgctccatgattgtcggcatcctctgcgtcatcttcggaaccatcatgtacgcctccccgctcaccatcatgggtaaggtgatcaagaccaagagtgtggagtacatgccattcaccctgtcgctggttaacttcctcaacggctgctgctggttggcctacgcgctcatcaagttcgacctctacgtcacgatccccaatggcctcggcgctttcttcggcctaatgcagctcatcctctacggctgctactacaagagaacccccaaggaggagaagagcgtcgagctgcccaccagcaaccccgccggagccggcaacgtctccgtcaccgtggacagataa

SEQ ID NO: 8 - DNA, 570 bp, Triticum aestivum
atgctctgggtcttctacggcctccccatcgtccatcccaacagcatcctcgtcgtcaccatcaacgggatcgggctcgtcatcgagggctcctacctcatcatcttcttcctctactccaccaacaacaagcggctgaagatgataggcgtgctcgccgccgaggcggggttcatggtggccgtcgtgctcggcgtgctcctcggtgcccacacccacgagaagcgctccatgatcgtcggcatcctcggcgtcatcttcggaaccatcatgtatgcctccccgctcaccatcatgggtaaggtgatcaagaccaagagtgtggagtatatgccattcaccctgtcgctggttaacttcctcaacggctgctgctggttagcctacgcgctcatcaagttcgacctctatgtcacgatccccaatggcctcggcgctttcttcggcctcatgcagctcatcctctacggctgctactacaagagaacccccaaggaggagaagagcgtcgagctgcccaccagcaaccccgccggagccggcaacgtctcggtcaccgtggacagataa

SEQ ID NO: 9 - DNA, 732 bp, Triticum aestivum
atggtgtccgccgacgcagctcgcaacgtcgtcggtatcatcgggaatgtcatctccttcggcctcttcctctcccctacgccggttttctggcggatcatcaaggccaaggacgtggaggagttcaagccggacccctacctggcgacgctgctcaactgcatgctctgggtcttctacggcctccccatcgtccaccccaacagcatcctcgtcgtcaccatcaacgggatcgggctcgtcatcgagggctcctacctcatcatcttcttcctctactccaccaacaacaagcggctgaagatgataggcgtgctcgccgccgaggcggcgttcatggtggccgtcgtgctcggcgtgctcctcggtgcccacacccacgagaagcgctccatgatcgtcggcatcctctgcgtcatcttcggaaccatcatgtatgcctccccgctcaccatcatgggtaaggtgatcaagaccaagagtgtggagtacatgccattcaccctgtcgctggttaacttcctcaacggctgctgctggttggcctacgcgctcatcaagttcgacctctacgtcacgatccccaatggcctcggcgctttcttcggcctcatgcagctcatcctctacggctgctactacaagagaacccccaaggaggagaagagcgtcgagctgcccaccagcaaccccgctggagccggcaacgtctcggtcaccgtggacagataa

SEQ ID NO: 10 - DNA, 5127 bp, Triticum aestivum
atgcgctggcacactgaggtgcaagaaaagaaagacatctacgcaccgttcaatattctgcctctcgatgcggccagtgcatcccagtccatcatgcagctggaggagataaaagcagcagtcgcagctctgcggtacacacggggtttgacctggccttctgcatttgagccggaaaggcagaaggggggtgagctcgatttgctcgattggttgagagctatgtttggctttcagcgggacagtgtcaggaatcaacgggagcatttgattcttctcctcgctaatgtgcacattagacttgagccaaagcctgaaccacttagcaagctagatgaccgagctgttgatgtagtgatgaacaagttgttcaacaactacaagaagtggtgcaaatttttgtcacggaaacatagtttgagaaatcctccaggtgctcaattacaggaagttcagcaacgcagaattctgtacctaggtctttatcttcttatctggggcgaatcagcaaatatccggtttatgccagagtgtctttgctacatttttcacaatatggcatatgagttgcatgggttgcttgctggaaatgttagtattgtgactggtgaaaatatcaggccatcttatggtggggatgaggaggctttcttaaagaaagtggtcacacctatctatcgtgtcatcagaaaggaggcaggaaaaagccaacatggaaagactgcacattcagcatggtgtaattatgatgatctaaatgagtacttctggacacctgattgtttctcactgggatggccaatgcgagatgatggtgacttcttcaaatccgtgcacgattcaaggcctgtagcagtggctggaagctcctcaccaaagggttctagtaaaggcacaggcaagacaaattttgtagagacaagatcgttttggcacatctttcgtagttttgaccgaatgtggaccttctatctgttggctctacaggcaatgttgatttttgcttggagcgaatattcagtgactcaaatccttcagaaggacctcttatattctctatcaagcatatttgtcacagcagcatttttacagttcctccaaagtattttagactttattctgaactttcctggccacattagatgcaagttcattgacgtcgtgagaaatattctgaagatagtagttagtgccgcgtgggctgtgattcttcccattttctacatcagcagtcaaacaaaagtcaatttaccactgaaaaatctggacagatggtttggttatgtgaaaggagtgccacaactatatatcctggctgtggcggcgtacctgatacctaatatgattagtgcaatgctcttcctgtttccgatgtttcgaaggtggatagagagctcggattggcatattgttagactactactgtggtggtctcagaaacgaatttatgttggccgtggaatgcatgaaagtcaagctgctcttctgaagtacacattattttggattttgctgctatgtgcgaagctttccttcagttactttgtccagatacaacctcttataaggcctaccaaggatataatgagtgttcataacattcgttatgagtggcatgagttttttccaaacgcatcatataatatcgctgctatcctatccctctgggcccctgttctgttggtctatttgatggatacacagatatggtatgccattttctctacaatatccggcggtaacaaaggcagaaacagacgtttttcactcgtttcccccaacaagagaactgaagctgccaagtttgctcaactgtggaatgaagtgatttgcagtttccgcgacgaagattttataagtgataaggagatggacctattggtggttccatactcatcagacccgagcttaaaattgatgcagtggccgttgttcttgcttgctagcaagatacctatagctttagacatggcagcacaatttagaccaagagacagtgatttgtggaagcgtatatgtgcagacgagtatatgaagtgcgctgtaattgaatgctacgagtcattcaaacttgttcttaatttagtggtggttggagaaaatgaaaagaggattattggcattataatcaaagagattgaagctaacatcgcaaagaatacattccttgccaattttaggatgagcgcattgccagtcctttgcaagaagtttgtggagcttgtatccaccttgaaagaaagagacgcctcaaaatttgataatgtagtgctattgcttcaagacatgctggaagtgatcacgagggatatgatggtcaatgagatcaaagaactggctgaatttggtcatgggaacaaggatttagttccaagaagacaactttttgcgggcacaggcacaaaacctgcaattgttttcccaccaccaatttctgcgcagtgggaagaacaaattaagcgcttgtacctgcttttgactgttaaagaatcagcaatggatgtgcctacaaatcttgaagcccgccggagaatatcatttttcactaattcgctattcatggagatgccacgtgcgcctagagtgcgcaaaatgctctctttcagtgtaatgacaccatactacagtgaggaaactgtatattcaagaaacgaccttgatctggagaatgaggatggtgtatcaattatattctacctgcagaagatctttccagatgaatgggataatttcatggaaaggattgattgcaaaagagaaactgaagtttggggaaatgaagaaaatgttcttcaacttcgtcattgggcctctcttagagggcagacactctgtcgaacagtgagaggcatgatgtattacaggaaagctttgaagcttcaagcattcctagacatggcttctgaatctgagatactagaaggctataaagccattgcagatcccgcagaggaagagaagaaaagccaaagatctctgtcttctcagcttgaagctatagcagatatgaaattcacatatgttgctacgtgccagatctatggaaatcagaaacagtcgggtgatcgacacgcaacagatatactgaacttgatggtgaattatcctggtctccgcgtggcatacattgatgaagttgaagagagggatggtgagaaggtgcaaaaggtcttctattcggtgctagtaaaagctcttgacaatcacgatcaggaaatataccgcataaaattgccagggccagcgaaactaggtgaagggaaacctgaaaaccaaaatcacgcgatcatttttacccgcggagaagctttgcaaaccattgatatgaaccaggacaattatttggaggaagctttgaaaatgcggaatttgctggaagaattcaatgagaaccatggtattcgtcctccaacaattcttggagtacgtgaacacatattcaccggaagtgtgtcatctcttgcctggtttatgtcaaaccaggaaaccagctttgtcacaataggacagagggttcttgccaatccattgaaggtacgttttcactatggacatcctgatgtgtttgataggatttttcacattacaagaggtggaattagcaaggcttcctgtggtataaacttaagtgaagacatttttgctggtttcaactcaactctgaggcgaggaaatgtcacccatcacgagtacattcaagtcggaaaaggacgtgatgttgggttgaatcaaatttcactctttgaggccaaagtggcgtgtggcaatggagaacaagtgcttagcagagatatctaccgtttgggccaccgctttgacttcttccgaatgctctcatgttacttcacaactgtgggattttatgtcagctcaatgatggttgtcataatagtatatgttttcttgtatgggaggctttatttagccttaagtggacttgagtttgcaattatgaagcaagcacgaatgagaggcaaccgtgctcttgaggcagccatggggtcccaatctattgtgcagctaggtcttttgatggccttacccatgtttatggagatcggactggaaaggggttttagaagcgccctgggggatttcatcatcatgcagctacagctatgtgcagtattctttaccttttccctcgggacaaaatcacattattttggccgcacaatcctccatggtggtgcaaaatatagagcaactggcagaggctttgttgttcgccatgtaaagttcgctgaaaattacagaatgtatagcaggagtcactttgtgaaaggacttgagctcatgttactacttgtagtgtatgagctctatggtgatgtggctaccgattccactgcctatgttctgctgacatcatctatgtggttcttggtaatcacatggttgtttgctcctttcctcttcaacccatccggatttgaatggcaaaaggtggtggatgattgggatgattggaacaaatggataagcagccgtggtgggattggtgtgccggccaataaggcctgggagtcgtggtgggaagaggagcaggaacatctgctgtcaacaggcataatcggccgcatatgggaaatcatattatctctccgattcttcatgtttcagtatggtatcatgtaccatctgaatatctctaatggcaacaaaagcatatcaatttatggtctgtcttggctggtcactgtagcagtggtgttagtcctcaaggtggtatctatgggaagaaagaaatttagtgctgacttccagcttatgttccggctcctcaaattgttcttgttcattggatctgttggaactttggcgattcttttcacccttctgcaccttacagttggtgacatattcgccagcttccttgcctttgcacccacaggatgggccattctgcagatatcacaggcaagcaagccagtggtgaaggcttttggtctgtggggatctgtgaaggccttgtccagggggtacgagtaccttatggggatcgtgatcttcgtgccagtggcggttctggcatggttcccttttgtctcggagttccagacgaggctgctattcaaccaggcattctcccgaggcctccaaatctctcgcattttggctggcgga

SEQ ID NO: 11 - DNA, 5721 bp, Triticum aestivum
atgacggcgccgcgcggtggcggggatatgccatcgtcgacggcgtcggccgccgccgccgcttcgacgtcggagcccaacacgccgtcgtcggcgcacgcgtcggggctcaaccggcgggggtcgaggggcgccgccatggcctccttctccatggaggtcttcgacaacgaggtggtgccgtcctccctcagcagcatcgcccccatcctgcgcgtcgccgccgagatcgagcacgagcgcccccgcgtcgcctacctctgtcggttctatgccttcgagaaggcgcacaggctggaccagaactccgttggccgtggcgtccggcagttcaaaacgtccctgcttcaacgattagagaaggataatagcccgagtctcgcaaagcgattgaagaaaactgatgcccgcgaaattgagagtttctatcaagaatactatgagaactatgtccgcaccctcgacaaaggggaacaagccgacaggactcaacttgggaaggcctaccaaacggctggagtcctcttcgaggtgctctgtgccgtcaacaagaatgagaaggttgagcaagttaaccccgagattatgcgctggcacactgaggtgcaagaaaagaaagacatctacgcaccgttcaatattctgcctctcgatgcggccagtgcatcccagtccatcatgcaactagaggagataaaagcagcagtcgcagctctgcggtacacacggggtttgacctggccttctgcatttgagccggaaaggcagaaggggggtgagctcgatttgctcgattggttgagagctatgtttggctttcagcgggacagtgtcaggaatcaacgggagcatttgattcttctcctcgctaatgtgcacattagacttgagccaaagcctgaaccacttagcaagctagatgaccgagctgttgatgtagtgatgaacaagttgttcaacaactacaagaagtggtgcaaatttttgtcacggaaacatagtttgagaaatcctccaggtgctcaattacaggaagttcagcaacgcagaattttgtacctaggtctttatcttcttatctggggcgaatcagcaaatatccggtttatgccagagtgtctttgctacatttttcacaatatggcatatgagttgcatgggttgcttgctggaaatgttagtattgtgactggtgaaaatatcaggccatcttatggtggggatgaggaggctttcttaaagaaagtggtcacacctatctatcgtgtcatcagaaaggaggcaggaaaaagccaacatggaaaaactgcacattcagcatggtgtaattatgatgatctaaatgagtacttctggacacctgattgtttctcactgggatggccaatgcgagatgatggcgacttcttcaaatccgtgcatgattcaaggcctgtagctggaagctcctcaccaaagggttctagtaaaggcacaggcaagacaaattttgtagagacaagatcgttttggcacatctttcgtagttttgaccgaatgtggaccttctatctgttggctctacaggcaatgttgatttttgcttggagtgaatactcagtgactcaaatccttcagaaggacctcttatattctctatcaagcatatttgtcacagcagcatttttacagttcctccaaagtattttagactttattctgaactttcctggccacattagatgcaagttcattgacgtcgtgagaaatattcttaagatagtagttagtgccgcgtgggctgtgattcttcccattttctacatcagcagtcaaacaaaagtcaatttaccactgaaaaatctggacagatggtttggttatgtgaaaggagtgccacaactatatatcctggctgtggcggtgtacctgatacctaatatgattagtgcaacgctcttcctgtttccgatgtttcgaaggtggatagagagctcggattggcatattgttagactgctactgtggtggtctcagaaacgaatttatgttggccgtggaatgcatgaaagtcaagctgctcttctgaagtacacattattttggattttgctgctatgcgcgaagctttccttcagttactttgtccagatacaacctcttataaggcctaccaaggatataatgagtgttcataacattcgttatgagtggcatgagttttttccaaacgcatcatataatatcgctgctatcctatccctctgggcccctgttctgttggtctatttgatggatacacagatatggtacgccattttctctacaatatccggcggtatgtctggggcacttggacgacttggggaggtttcccccaacaagagaactgaagctgcgaagtttgctcaactgtggaatgaagtgatttgcagtttccgcgacgaagattttataagtgataaggagatggacctattggtggttccatactcgtcagacccgagcctaaaattgatgcagtggccgttgttcttgcttgctagcaagatacctatagctttagacatggcagcacaatttagaccgagagacagtgatttgtggaggcgtatatgtgcagacgagtatatgaagtgcgctgtaattgaatgctacgagtcattcaaacttgttcttaatttagtggtggttggagaaaatgaaaaaaggattattggcattataatcaaagagattgaagctaacatcgcaaagaatacattcctcgccaattttaggatgagcgcattgccagtcctttgcaagaagtttgtggagcttgtatccaccttgaaagaaagagacgcctcaaaatttgataatgtagtgctattgcttcaagacatgctggaagtgatcacgagggatatgatggtcaatgagatcaaagaactagctgaatttggtcatgggaacaaggatttagttccaagaagacaactttttgcgggcacaggcacaaagcctgcaattgttttcccaccaccaatttctgcgcagtgggaagaacaaattaagcgcttgcaccttcttttgactgttaaagaatcagcaatggatgtgcctacaaatcttgaagcccgccggagaatatcatttttcactaattcgttgttcatggagatgccacgtgcgcctagagtgcgcaaaatgctctctttcagtgtaatgacaccatactacagtgaggaaactgtatattcaagaaacgacctggatctggagaatgaggatggtgtatcaattatattctacctgcagaagatctttccagatgaatgggataatttcatggaaaggattgattgcaaaagagaaactgaagtttggggaaatgaagaaaatgttcttcaacttcgtcattgggcctctcttagagggcagacactatgtcgaacagtgagaggcatgatgtattacaggaaagctttgaagcttcaagcattcctagacatggcttctgaatctgagatactagaaggctataaagccattgcagatcctgcagaggaagagaagaaaagccaaagatctctgtcttctcagcttgaagctatagcagatatgaaattcacatatgttgctacgtgccagatctatggaaatcagaaacagtcgggtgatcgacacgcaacagatattttgaacttgatggtgaattatcctggtctccgcgtggcatacattgatgaagttgaggagagggatggtgagaaggtgcaaaaggtcttctattcggtgctagtaaaagctcttgacaatcacgatcaggaaatataccgcataaaattgccagggccagcgaaattaggtgaagggaaacctgaaaaccaaaatcacgcgatcatttttacccgcggagaagctttgcaaaccattgatatgaaccaggacaattatttggaggaagctttgaaaatgcggaatttgctggaagaattcaatgagaaccatggtattcgtcctccaacaattcttggagtacgtgaacacatattcaccggaagtgtgtcatctcttgcctggtttatgtcaaaccaggaaaccagctttgtgacaataggacagagggttcttgccaatccattgaaggtacgttttcactatggacatcctgatgtgtttgataggatttttcacattacaagaggtggaattagcaaggcttcctgtggtataaacttaagtgaagacatttttgctggtttcaactcaactctgaggcgaggaaatgtcacccatcacgagtacattcaagtcggaaaaggacgtgatgttgggttgaatcaaatttcactctttgaggccaaagtagcgtgtggcaatggagaacaagtgcttagcagagatatctaccgtttgggccaccgctttgacttcttccgaatgctctcatgttacttcacaactgtgggattttatgtcagctcaatgatggttgtcataatagtatatgttttcttgtatgggaggctttatttagccttaagtggacttgagtttgcaattaggaagcaagcacgaatgagaggcaaccgtgctcttgaggcagccatggggtcccaatctattgtgcagctaggtcttttgatggccttacccatgtttatggagatcggactggaaaggggttttagaagcgccctgggggatttcatcatcatgcagctacagctatgtgcagtattctttaccttttccctcgggacaaaatcacattattttggccgcacaatcctccacggtggtgcaaaatatagagcaactggcagaggctttgttgttcgccatgtaaagttcgctgaaaattacagaatgtatagcaggagtcactttgtgaaaggacttgagctcatgttactacttgtagtgtatgagctctatggtgatgtggctaccgattccactgcctatgttctgctgacatcatctatgtggttcttggtaatcacatggttgtttgctccattcctcttcaacccatccggatttgaatggcaaaaggtggtggatgattgggatgattggaacaaatggataagcagccgtggcgggattggtgtgccggccaataaggcctgggagtcgtggtgggaagaggagcaggaacatctgctgtcaacaggcatcatcggccgcatatgggaaatcatattatctctccgattcttcatgtttcagtatggtatcatgtaccacctgaatatctctaatggcaacaaaagcatatcaatttatggtctgtcttggctggtcattgtagcagtagtgttgatcctcaaggtggtatctatgggaagaaagaaatttagtgctgacttccagcttatgttccggctcctcaagttgttcttgttcattggatctgttggaactttggcgattcttttcacccttctgcaccttacagttggtgacatattcgccagcttccttgcctttgtacccacaggatgggccattctgcagatatcacaggcaagcaagccagtggtgaaggctttagggctgtggggatctgtgaaggccttgtccagggggtacgagtaccttatggggatcgtgatcttcgtgccagtggcggttctggcatggttcccttttgtctcggagttccagacgaggctgctattcaaccaggcattctcccgaggcctccaaatctctcgcattttggctggcggaaagaagcagaactga

SEQ ID NO: 12 - DNA, 5589 bp, Triticum aestivum
atggcctccttctccatggaggtcttcgacaacgaggtggtgccgtcctcgctcagcagcatcgcccccatcctgcgcgtcgccgccgagatcgagcacgagcgcccccgcgtcgcctacctctgtcggttctatgccttcgagaaggcgcacaggctggatcaaaactctgttggtcgtggcgtccggcagttcaaaacgtccctgcttcagcgcttagagaaggataatagcccgagtctcgcaaagcgattgaagaaaactgatgcccgcgaaattgagagtttctatcaagaatactatgagaactatgtccgcaccctcgacaaaggggaacaagccgacaggactcaacttgggaaggcctaccaaacggctggagtcctcttcgaggtgctctgtgccgtcaacaagaatgagaaggttgagcaagttaaccccgagattatgcgctggcacactgaggtgcaagaaaagaaagacatctacgcgccgttcaatattctgcctctcgatgcggccagtgcatcccagtccatcatgcagctggaggagataaaagcagcagtcgcagctctgcggtacacacggggtttgacctggccttctgcatttgagccggaaaggcagaaggggggtgagctcgatttgctcgattggttgagagctatgtttggctttcagcgggacagtgtcaggaatcaacgggagcatttgattcttctcctcgctaatgtgcacattagacttgagccaaagcctgaaccacttagcaagctagatgaccgagctgttgatgtagtgatgaacaagttgttcaacaactacaagaagtggtgcaaatttttgtcacggaaacatagtttgagaaatcctccaggtgctcaattacaggaagttcagcaacgcagaattttgtacctaggtctttatcttcttatctggggcgaatcagcaaatatccggtttatgccagagtgtctttgctacatttttcacaatatggcatatgagttgcatgggttgcttgctggaaatgttagtattgtgactggtgaaaatatcaggccatcttatggtggggatgaggaggctttcttaaagaaagtggtcacacctatctatcgtgtcatcagaaaggaggcaggaaaaagccaacatggaaaaactgcacattcagcatggtgtaattatgatgatctaaatgagtacttctggacacctgattgtttctcactgggatggccaatgcgagatgatggtgacttcttcaaatccgtgcacgattcaaggcctgtagcagtggctggaagctcctcaccaaagggttctagtaaaggcacaggcaagacaaattttgtagagacaagatcgttttggcacatctttcgtagttttgaccgaatgtggaccttctatttgttggctctacaggcaatgttgatttttgcttggagtgaatattcagtgactcaaatccttcagaaggacctcttatattctctatcaagcatatttgtcacagcagcatttttacagttcctccaaagtattttagactttattctgaactttcctggccacattagatgcaagttcattgacgtcgtgagaaatattctgaagatagtagttagtgccgcgtgggctgtgattcttcccattttctatatcagaagtcaaacaaaagtcaatttaccactgaaaaatctggacagatggtttggttatgtgaaaggagtgccacaactatatatcctggctgtggcggtgtacctgatacctaatatgattagtgcaacgctcttcctgtttccgatgtttcgaaggtggatagagagctcggattggcatattgttagactgctactgtggtggtctcagaaacgaatttatgttggccgtggaatgcatgaaagtcaagctgctcttctgaagtacacattattttggattttgctgctatgcgcgaagctttccttcagttactttgtccagatacaacctcttataaggcctaccaaggatataatgagtgttcataacattcgttatgagtggcatgagttttttccaaacgcatcatataatatcgctgctatcctatccctctgggcccctgttctgttggtctatttgatggatacacagatatggtatgccattttctctacaatatccggcggtatgtctggggcacttggacgacttggggaggtttcccccaacaagagaactgaagctgccaagtttgctcaactgtggaatgaagtgatttgcagtttccgcgacgaagattttataagtgataaggagatggacctattggtggttccatactcatcagacccgagcctaaaattgatgcagtggccgttgttcttgcttgctagcaagatacctatagctttagacatggcagcacaatttagaccgagagacagtgatttgtggaagcgtatatgtgctgacgagtatatgaagtgcgctgtaattgaatgctacgagtcattcaaacttgttcttaatttagtggtggttggagaaaatgaaaagaggattattgggattataatcaaagagattgaagctaacatcgcaaagaatacattccttgccaattttaggatgagcgcattgccagtcctttgcaagaagtttgtggagcttgtatccaccttgaaagaaagagacgcctcaaaatttgataatgtagtgctattgcttcaagacatgctggaagtgatcacgagggatatgatggtcaatgagatcaaagaactagctgaatttggtcatgggaacaaggatttagttccaagaagacaactttttgcgggcacaggcacaaaacctgcaattgttttcccaccaccaatttctgcgcagtgggaagaacaaattaagcgcttgtaccttcttttgactgttaaagaatcagcaatggatgtgcctacaaatcttgaagcccgccggagaatatcatttttcactaattcgctattcatggagatgccacgtgcgcctagagtgcgcaaaatgctctctttcagtgtaatgacaccatactacagtgaggaaactgtatattcaagaaacgaccttgatctggagaatgaggatggtgtatcaattatattctacctgcagaagatctttccagatgaatgggataatttcatggaaaggattgattgcaaaaaagaaactgaagtttggggaaatgaagaaaatgttcttcaacttcgtcattgggcctctcttagagggcagacactctgtcgaacagtgagaggcatgatgtattacaggaaagctttgaagcttcaagcattcctagacatggcttctgaatctgagatactagaaggctataaagccattgcagatcccgcagaggaagagaagaaaagccaaagatctctgtcttctcagcttgaagctatagcagacatgaaattcacatatgttgctacgtgccagatctatggaaatcagaaacagtcgggtgatcgacatgcaacagatatactgaacttgatggtgcattatcctggtctccgcgtggcatacattgatgaagttgaggagagggatggtgagaaggtgcaaaaggtcttctattcggtgctagtaaaagctcttgacaatcacgatcaggaaatataccgcataaaattgccagggccagcgaaattaggtgaagggaaacctgaaaaccaaaatcacgcgatcatttttacccgcggagaagctttgcaaaccattgatatgaaccaggacaattatttggaggaagctttgaaaatgcggaatttgctggaagaattcaatgagaaccatggtattcgtcctccaacaattcttggagtacgtgaacacatattcaccggaagtgtgtcatctcttgcctggtttatgtcaaaccaggaaaccagctttgtgacaataggacagagggttcttgccaatccattgaaggtacgttttcactatggacatcctgatgtgtttgataggatatttcacattacaagaggtggaattagcaaggcttcctgtggtataaacttgagtgaagacatttttgctggtttcaactcaactctgaggcgaggaaatgtcacccatcacgagtacattcaagtcggaaaaggacgtgatgttgggttgaatcaaatttcactctttgaggccaaagtggcgtgtggcaatggagaacaagtgcttagcagagatatctaccgtttgggccaccgctttgacttcttccgaatgctctcatgttacttcacaactgtgggattttatgtcagctcaatgatggttgtcataatagtatatgttttcttgtatgggaggctttatttagccttaagtggacttgagtttgcaattatgaagcaagcacgaatgagaggcaaccgtgctcttgaggcagccatggggtcccaatctattgtgcagctaggtctattgatggccttacccatgtttatggagatcggactggaaaggggttttagaagcgccctgggggatttcatcatcatgcagctacagctatgtgcagtattctttaccttttccctcgggacaaaatcacattattttggccgcacaatcctccacggtggtgcaaaatatagagcaactggcagaggctttgttgttcgccatgtaaagttcgctgaaaattacagaatgtatagcaggagtcactttgtgaaaggacttgagctcatgttactacttgtagtgtatgagctctatggtgatgtggcgacagattccacggcctatgttcttctgacatcatctatgtggttcttggtaatcacatggctgtttgctccattcctcttcaacccatcaggatttgaatggcaaaaggtggtggatgattgggatgattggaacaaatggataagcagccgtggcgggattggtgtgccggccaataaggcctgggagtcgtggtgggaagaggagcaggaacatctgctgtcaacaggcataatcggccgcatatgggaaatcatattatctctccgattcttcatgtttcagtacggtatcatgtaccatctgaatatctctaatggcaacaaaagcatatcaatttatggtctgtcttggctggtcactgtagcagtagtgttggtcctcaaggtggtatctatgggaagaaagaaatttagtgctgacttccagcttatgttccggctcctcaaattgttcttgttcattggatctgttggaactttggcgattcttttcacccttctgcaccttacagttggtgacatattcgccagcttccttgcctttgcacccacaggatgggccattctgcagatatcacaggcaagcaagccagtggtgaaggcttttggtctgtggggatctgtgaaggccttgtccagggggtacgagtaccttatggggatcgtgatcttcgtgccagtggcggttctggcatggttcccttttgtctcggagttccagacgaggctgctattcaaccaggcattctcccgaggcctccaaatctctcgcattttggctggcggaaagaagcaaaactga

SEQ ID NO: 13 - DNA, 14392 bp, Triticum aestivum
  modified_base (3134)..(3234): a, c, t or g
  modified_base (4118)..(4147): a, c, t or g
  modified_base (4523)..(4623): a, c, t or g
  modified_base (11828)..(11928): a, c, t or g
  modified_base (13130)..(13198): a, c, t or g
  modified_base (13418)..(13518): a, c, t or g
cttgccgggggtctcgtggatttccttggcaaggatcttgacaaggatcgtcgtcttctggttctcatttgatcttgtgtatttatgatctccataaagatctacatgccaccacagaggcgcctcccgagccttggttccgatatggttgatggcgttgaaattccttggctcaagggtggcgcgctctgctggcattgggcaagttgccccggcaaggctcttgtcggggctgcggagactgcaccggcaatgctcttgccagggctgcagagactgcctcggcaagggtcttgccgggggagtccacttcgctcccttgctctttgtgtctccggtcttcgcgttgctttggttatcttgtgcttcggcttccctcctctgctctgctcagtgcgagcgcaggtgcggctctgactgcccgttgatacgtctccaacgtatctataatttttaattgctccatgctatattatctactgttttggacattattgaactttattatccacttttatattatttttgggactaacctattaaccggaggcccagcccataattgctgttttttgcctatttcagagtttcacagaaaaggaatatcaaacggagtccaaaccgaatgaaaccttcgggaacgtgattttctcaccgaacatgatccaggagacttggaccctacctcaagaaataaaggaggaagccacgaggtagggggcgcgcctacccctctcccccaggcgcgccctccactctcgtgggtccctctgttgctccaccgacgtactccttcctcctatatatacctatgtacccccaaacgatcaaatacggatcgagaaccctaattccaccgccgtaactttctgtatccacgaaatcccatcttggtgcctattccagagctccgccggagggggcatctatcacggagggcttctacatcaacatcatagcctctccgatgaagtgtgagtagtttacctcagaccttcgggtccatagttattagctagatggcttcttctctctttttggatcacaatacaatgtactccccctctcttgtggatatctattcgatgtattcttgtttttgtggtgtgtttgttgagaccgatgaattctgggtttatgatcaagattatctatgaacaatatttgaatcttctctggatttttttatgtatgattggttatctttgcaagtctcttcgaattaccagtttggtttggcctactagattgatctttcttgcaatgggagaagttcttagctttgggttcaatcttttggtgtcctttcccagttacagtaggggcagcaaggcacgtattgtattgttgccatcgaggataacaaggtgttttttttatcatattgcatgaatttatccctctacttcatgtcatcttgcttaaggcgttactttgttttcatgaatttaatactctagatgcatgctggatagcggtcgatgagtggagtaatagtagtagatgcaagcaggaatcggtctatttgtcttggacgtgatgcctatatacatgatcatacctagatattctcataactatgctcaattctatcaattgctcaacagtaattcgttcacccaccgtaaaatatatatgctcttgagagaagccactagttaaacctatggcccccgggtctatcttcatcatattaatcttccaatacttagttatttcctttcctttttactttgcttttattttacgttgcatctttatcacaaaaataccatgaatattatcctatcatatctcactctcgtaagtgaccgtgaagggattgacaacctcttaccgcgttggttgcgaggagttatttgttttgtgcaggtgcaagggactcgcgcgtagcctcctactggattgataccttggttctcaaaaactgagggaaatacttacgctactttgctgcatcatcctttcctcttcaaggaaatcgaacgcagtgctcaaggggtagcaaaaagaatttctagcgccgttgctggggaggttcgcacaagtcaagatttgactcccgacaatgagccatttctggcgccgttgccggggaatctacgcaaaagtcaacataccaagtacccactacaacccttatctcccgcattacattatttgccatttgcctctcgttttccactcccccacttcacccttgctgtttaattcgccctctccctctatcctccctctctttctctatttacctctttttgcccacttgctttttgtttacttgtgtgttggattgcttgcttgtcatgatggctcaagataacactaaattgtgtgactttaccaatgccaacaacaatgattttattagcactctgattgctcctcttagcgatgctgaatcttgtgaaattaatgccgctttgctgaatcttgtcatgaaagatccgttttccggccttcctagtgaagatgccgctacccatctaaatagcttcattgatttgtgtgatatgcaaaagaagaaatatgtggacaacaatattgttaagttgaagctatttcctttttcgcttagagattgtgctaaaacttggttttcgtctttgcctaaaaatagtatttattcttggaacaagtgcaaagatgtttttatctctaattattttcctcccgctaagatcatctcccttagaaacgatattatgaattttaagcaacttgatcatgaacatgttgcacaagcttgggcgaggatgaaattaatgatacgtaattgccctactcatggtttgaatttgttgatgattatacaaaaattttatgccagattgaattttgcttctagaaatcttttagattcggccgcgggaggcacttttacggaaatcagtttaggagaagctactaaactcctagataatattatggttaattattctcaatggcatattgaaagatctactaataaaaaggtgcatgcgatagaagaaattaatgttttgagtagaaagatggatgagcttatgaaattatttgctagtaagagtgtttcttatgatactaatgatatgcccttgtctactttgattgagaataataatgaatctatggatgtgaattttgttggtagnnnnnnnnnnnnnnnnnnnnnnnnnnnnnnnnnnnnnnnnnnnnnnnnnnnnnnnnnnnnnnnnnnnnnnnnnnnnnnnnnnnnnnnnnnnnnnnnnnnnntggtatgagatagtccttggttgatttatagaatgctctatgcacttcacttatatcttttgagtatggctttataggatgcttcatgcgcttcacttatatcatttaaagtttggattgcctgtttctctttacatagaaaaccgccatttgtagaatgctcttttgcttcacttatatatgttagagcgtgggcatatattttgtagaaagaattaaactctcttgcttcacttatatctatttagacagatgacaggaacatgtcattcacatggttagtcataaaatcctacataaaacttgtagatcattgaatatgatatgtttgattccttgcaatagttttgcgatataaagatggtgatattagagtcatgctagtgggtagttgtggattagtagaaatacttgcgttgaggtttgtgattcccgtagcatgcacgtatggtgaatcgttatgtaacaaagtcggagtatgaggtatttattgattgtcttccttattagtggcggtcggggacgagcgatggtattttcctaccaatctatccccctaggggcatgtgtagtagtacttttcttcgagggctaataaacttttgcaataagtatgtgagttctttatgactaatgttgattccatggattatacgcacgctcacccttccatcattgctagcctctctagtatcgcgcaactttcgccggtaccataaacccaccatataccttcctcaaaacagctaccatacctacctatcatggcatttccatagccattctgagatatattgccatgcaacttgcatcatcatcatatacatgacttgagcattcattgtcatattgctttgcatgatcgtaagatagctagcatgatnnnnnnnnnnnnnnnnnnnnnnnnnnnnnncattgctacgctagatcattgcacatcccggtacaccgccggaggcattcatatagagtcatatctttgttatagtatcgagttgtaagtaaataaaagtgtgctgatcatcattattagagcattgccccagtgaggaaaggatgatggagactatgattcccccagaagtcgggatgagactccagacaaaaaaataaaaaataaaaaaagagaaaggccaaaaaaaaggagaaggcccaaaaaaataaaaaaataaaaaaataaaaaatgagagaaaaagagagaaggggcaatgttactacccttttaccacacttgtgcttcaaagtagcaccatgttcttcatatagagagtctcttgagttatcacttnnnnnnnnnnnnnnnnnnnnnnnnnnnnnnnnnnnnnnnnnnnnnnnnnnnnnnnnnnnnnnnnnnnnnnnnnnnnnnnnnnnnnnnnnnnnnnnnnnnnnccgagtcaaaaccattgttgaccactgccacatcagctgcgggtgaagacaaaccggccagggtttttttgtgtgtccggttttggtttgtttagggggtggaagaagccgaaaataagatgaggaggtaaagtgaaccacccactttattcggggtagtaaaatggacttttttctttctcaaatacttgttcaatatttttcaaatatttgttcaatagttttatatacatgatcaacattttttgaaatacttgtcaacatttttcaaatacttgcccaacatgttcaaaatatttgttcaagatctttcaaatattttttgaagagtgttttgtgtaatatatatatttagaatattttagagtataaacaaaagaaaaataaaaggtgcggatggactaggcctctgacaaggataagtatccacacagcaaagaaaagtcttcttcctcctcccgtcggcgccgccgcggatccgccccgcctccgatggcatttgcctgtggaggagcggaggatcttggccccccgccggcgggagggaccctgttctcatttttgctagactgaacatcttggttggggctgtgtggcggcggcgatgtcccttggtagcaataatgtctcccacatcccatccccgtcccgatggtgcgaatagcgttgttgaaggatgtgtggaggtgtgtctccgtcggatctcatgggatttggtcggtgctggtctttgatggatttatttggatccagtttttgttcgtcttcgttcgtgtggtttcaggcttgatttttccgatctacaactcccttcatcggcgatggttgctgctctggtgtgctcgtcctttgggaccttagcacaatgacttcccaactgtctactacaacaaggtttgcgcggctccgatgatggaggggcgatgatggtggcgcgccattggctcgctccagtgcttgtagttgtcgctaggtggtccatagacctggttgtaatttttattacctcttgtgttctctgtactgccatgaatgatgaataaattggaaatttctctctcaaaaaaagaaagaaaaaaactaaaataaaaacgtgaaagaaacaaaacagaaaccaggctggtctttccagtgcgcgtgagccggcccaaccggggttccgttcagcatggggttcgctcctgtctcgcttacaatgccagacatagggcgcccttgagatcagggcaacttagagagagagatcaaggcttatccctcccgcccttttctctcggttagttaattagttttgactgagatcagttgcaacgataacttgggaagccgccgcgcctatatacgctccgcctccctctgccccgatcgcccattcgcccccaacccacaaccaacccttcctccttcctcaagcgcgtcagctcctccgccccggcgacccgagcgagatggtttccgctgacgcagctcgcaacgtcgtcggtatcatcgggaatgtcatctccttcggcctcttcctctcccctacgtaagcccccatcccccctcctctaatccgccgcctcttttgtagacagtctagagtaatctatattcatggatggtggttgttgcaggccggttttctggcggatcatcaaggccaaggacgtggaggagttcaagccggacccctacctggcgacgctgctcaactgcatgctctgggtcttctacggcctccccatcgtccaccccaacagcatcctcgtcgtcaccatcaatgggatcgggctcgtcatcgagggatcctacctcatcatcttcttcctctactccaccaacaacaagcgggtacgtactgccacatccctaaatctaatcccctcgcccgttgggtttcgtctagatagaacaagatctggccctaacccatgcccgtgcgtgtgtgcattcgtgcttgcagctgaagatgataggcgtgctcgccgccgaggcggcgttcatggtggccgtcgtgctaggcgtgctcctcggtgcccacacccacgagaagcgctccatgattgtcggcatcctctgcgtcatcttcggaaccatcatgtacgcctccccgctcaccatcatggtacgtacctacaccctccttcctcatgaatcgatcgtacgtgtgcatgcatgcactctttaatccatgctttaagcccttgatccgtttgctcttaattctggaggcgcagctgttattttatttcgtttcatttgttttgaactttgttagttgtgttttaatgcatgccgttctggtcgtatagagtgataatatgcatcgtttacaagacatgcgtggttaatctgcatgcatggatctactagctctttggcccaagtgtctttgagtggctagatgaatgcatgctgctcacctcacacagtagatgtactctccacacacaaattattttacgagacaagatgttgccttgtggacattttctgtattttgtggctagattcacgtaggggtctggcttcacacacccaagttatttcagaagatgcacaccgttcaatttacgtagatctacttcagacatccaagttatttcacaagatggtgttttgtgtgcacatgtttggtcaaaaaagctcaaaggtaacgcaacccctgcgtgtcctttccttgtggatctggacttgcatgccgtgtaaatagctatagccagccaaccaaactttctgttgcacccggccgccaaaatctcgtgttagctgttggagtgacgggtccgcaatcgcatggaagagccgttcatgacatgactaaaaacatgtgatccagcacttcatcacaaacgtatgtgccaatgccccgaggatgcatgcatggatatagtgcgtgcatgttctcttttgtttcttgtgatccttcactcttgccaaacctatgagttatgatgttaattaaccagtgagtttgtgtacctactcattatatttagatcaggaattcaatgagtcagccttgttaattacctacgtacgtacgtgtgctcttattacctggtgatgtaagtactactaagataagattgcaatacttgattgcagggtaaggtgatcaagaccaagagtgtggagtacatgccattcaccctgtcgctggttaacttcctcaacggctgctgctggttggcctacgcgctcatcaagttcgacctctacgtcacggtcagtacatgcatacatgcatacatgcatacatgcatacatgcatacatatacacatctcaaacaagtataccgattaaacctagctagctagatttttctgcctcatcgatctaactgccattcatgcatgcagatccccaatggcctcggcgctttcttcggcctaatgcagctcatcctctacggctgctactacaagagaacccccaaggaggagaagagcgtcgagctgcccaccagcaaccccgccggagccggcaacgtctccgtcaccgtggacagataagcattggcttgcagcagcagcagcagcaaactcgccgtcgccaagtgattctggtccggccggcggccgagattttagccctaaacattttgagtagttaaattccggatgatcgacgcttcaacaagtgtggtgtgctagtggtctttgttataattagctagtcttgatcgagtgtgcgtttcgtggtgtgccctcgtgcaacttagaactatattcgtgcatgggagcagacaggaacataatatatgtagctgagttgtcccgaataataattacaccacgcttgtcacgtatgtgtactctcgatcggaatctattcttacgcgatgatacaatatgtttatgaattatttctgcgaggctcagttgttaagaccgttcgttgttgtggaaccacatttttctaacgtctgcttcccttaacaccaccaccatgctgtcttgggaacgtgacggcaaccctgtcgctgagccacgataatctgtgaaaaacgacgtctacaagtaattttacagggatctcgtgttttttgttttagagaaaaagtgctacagccctgtccccatcttgtattaccaaaaacaagatttttttgcttgttggcattttttttgtgtgtgtacattttgtgcggatctcctgattttgtacttgaattttggttgtcattgctcatttagacagacaaataccgaatgcgtgtgacgctcctttagcgtttaagcacaaaaacctagattgccttttttttaacccccaaagcgtaaacaatagctctaaggtattttatattaacgtaaatcaacatcatagataaaaaaaactatccaatgcctattttttggtaacatatgaagtaggaatcattgtctcttaacaacatcatagatgcgttgcaatcagattctgaagactctcagcatacttcatattcactcgatgccccacaagagtcacataaaaaagaatttccaggcgttctcattttttaagaatctttccattcctaaggttccaaatattcaagcagcctaaaatgattatatccatggcaattcctctgaataactcaagagaagcaaaagtgctttcatcataggttaagatgcctctcttttcattctacgtaacctcataccaatattcttgtgcaaagatgaagtcccaaaacagatgtaagtaaaaccacacacacacacacacacacgcacgcacgcacgcacgcacgcacacacattcattacacttcagatagtattttcttttttcttttgagcatctttctgttattaactatatcatgaaagagcaaccagacgaagattttctttctgggcatgctaacactcttttgggccatttaaagataatttgagcatcgcgttgacctttcatcttgttgtacattttgatagaagagtatcttgctccaaaccaaggataaatccatttgcccatagcatggccactgaatttatgaagaataagatcctgaagctcattggaacgattgaatgtctgggtagctggagtctgaaaattgtctgctaactctcaaaggagtgcatctcagctaatgtgatatggtcatttgtaagcataggaatgtagttctggctaattttgcacagctcgagccaagagtcatgccataacaacacaaagtcactagatccaactacacatgatgacatcaagcaacttgcttgaatgttggtagatgtttaagatgagattttcaccaagatttttccccatggagaagatagacattccaagttgttataagagccctccagaggccccaaccgatggcgcaaactcaaaattattgatccttctagggcaaaaatttctcagatatgaactataaaaatatattctctcttagtttcctacaaacagtgaatggtacaccttcattcttcagttttgtttgttagagacaatcactcagcactattattaatacctctaatattccagttaagaatgttccaaagtccattgacgagaatatagattcaagattttctctaatataacaacatcatagaaactgcattaaactgagagtttgacaactctaagtgtcatctcttaacgatgcctacaactagaacaaatagagtacggaatatatatattctaatgtcgtgtatgtaaggaaagtgtccttccgcttccgagctcaaatgagctcggtgaagagtataatataaaaaattcaaaaaacattcaaacaatctgaattttttgtgacaagcactcacaaaagcttcaagtgcttgcaaaacttcgttatggaatcacattactttaaggtgtggcaaaaacaacaaaatcagtgcttcaaaatgcttttgaaagtagcacttttagagtatcgattttttttttgccacgccttctaggaatgtaatttcatgaggaacttttgcaagtacttgaaacccttgtcaatgtttctcacaaaaagatttcagatttttttactgttcaccgagctcatttgagctcgggctttgaaactctgtgtcgtgtatataacacattttttactgttcacatcagtttgattcacatcttcgcaaaggttcttgcactacggcttgctcctcggatgcgggaaatcgtttcaatgaaccagagcacattcatcgctggcagatgcgtgcacgataacttccttctcgtgcagcagacggcaaggctactccataacatcaaggcaccgcgcgttctcctcaagctcgacatcgcgaaagcattcgataccgttgcctggtccttcctgcttgagaccttgacccgccttggctttggccgtcgttggtgcgagtggatctccatcctgacatccacggcctccacgcgcgtcctaatcaacggcaaccccgggctgcctgtggatcatgcctgaggacttcgacaaggcgatcccatctcgcccatgctcttcgctattgtcatcgactcgctcaactcactgctacagcacgttgtttccgtaggcatcctgcagtggctcaccacccgtcatgccgcctcgagcatctctctctttgctgacgatgtcatcatcttctgtcaccccgacccccctgagcttgcctccatccgggagttgctacgtatctttggggatgcttccggcttgcgcaccaacttctctaagtgctccgctgtcgccatccaatgcggcaatgaggttgccgccgcgatcaccactgagctctcgtgtactgtcgccgccttccccatcacatacctcgggttgccgctatccatccgcaagtgtcacgcgtctactctcgtgcccctggtcgagcgactggccaagaaactagcaacttggaaggccactctcctttcatggggcgagcgactggccctggttagggatggcaattttatccatggatctggatacccatggatacccgacccggttgggcaagggtatgaagcacatttctgcccatggttccgtggatatggatacccacgaacagccggattgggcacggttatagtttgtgctccatggatatccaatggatacccgtacgtcatgtgaggccatatgccagtgatagtagaaagagcgaatcaatgggaaatggctggcaatatgcaactggtgccataagctatatgctgcagaatcaacctctagtatgtcacacttaaggactcatnnnnnnnnnnnnnnnnnnnnnnnnnnnnnnnnnnnnnnnnnnnnnnnnnnnnnnnnnnnnnnnnnnnnnnnnnnnnnnnnnnnnnnnnnnnnnnnnnnnnnaattattcatacatgaaaaatacataaaccaaacgtagtccaaacataaaatttgttcatcttgcataattgaaagataaaaaataaagttcagtgattttcaacgtggatccacatatgctatacaatatcattgagaagttgcatatgcacctattgaccctgaagttgttgatgcctatcaagaaagtttgcaatatgctccgcctcttgttccagacatgaactccgagcttctcaaaatcatgcatgcaggctgcgtcttcaccctcatcctcgccaataatgttgtgcaatattgcacaacatgtcataagctggcaaagtgtctccacttcccacatcattgcaactccacgaacaatacacctacgggcttggagcactttgaattccctctccacatccttcctagcaccttcttgcgcttgtgcaaaaagacattgtttcctaccatgaggaccagatagtcttcacaaacgccgcgcattgagaatagataccaccggcaagctagtacaccatgatatattttgtgcacattgatggtgtagctgcacgatggagcaacctcatcaccaggtctcttcaataaaggagatcattggagcacgttgatgtcattgttagaacctggcgtgccaaggaaagcatgccaaattcacaagtccttcgatgtcactgcttcaagtaaggtggtggcttctttggtgtggtcttggtactgcccatgcaaaccattgtggcagttcttgcattgcgagtgcatgtaatcaattgaaccgagcataactcaaaatcctctcgctgctccaactgccagtaacttttccatgccctccaaagttggttctctcatgtactctggtacaaacaccttcaccatagtgcatgcaaattccaccgtagtcttcaagcatgtgctctctcgcatcctaatttatgtatcaattccatatgcggccttaccatgcataagcatgcatcctaagagttgccgtgcatttttgcagaggaaagaatgaaagtttgccgcaacaatccttcctcggcttgaagttgtcatcagccttctccatggcagtcactacgcacaagaacaaagttctactcatctgaaagagatgtcgaaagaaaccttcatggtatgttgggtccagtgtgaagtagcccgtgtaaaaaagtcatgcactgtgaccttnnnnnnnnnnnnnnnnnnnnnnnnnnnnnnnnnnnnnnnnnnnnnnnnnnnnnnnnnnnnnnnnnnnnnatttcttcttggatgctcaccatcatcatcatttcaacatcttcatcatccgaatttaatgattcgatgaactcctttgtatatgaacttgtcaaggtctgtgtttctatagtcatcattcaacaatgaattcattggtgacctacaaatgactaaaagaacataaaaggtgctcggatatttcattgaatatatagagcgtgacgtgtatatctagagnnnnnnnnnnnnnnnnnnnnnnnnnnnnnnnnnnnnnnnnnnnnnnnnnnnnnnnnnnnnnnnnnnnnnnnnnnnnnnnnnnnnnnnnnnnnnnnnnnnnngctcaatggcacgtacacagaatataaaatgatttttatggagaaaaaggtagtccgctcactatatacaatggagcctacctgcctggtttgtcgctcttcagagtatctcacacaaggctgcggtggcctctctctctctctctcatcgttggtcactgatccggccacatcccgtccgccgggggaaagggagtgcggtggcctatctctctcaccattggtcactgatccggccgcatcccgtccgccgggggaaagggaggaagtgcatcgtttctccgttcgacggcgccgaggcagcacgtcccgatctgcggtacacgccgttctctctgaccaagctccgggcagcagggcctacgccaccttctggcagattccgcccgccgccgctcacctagttacatcccgacgacctctaggtatcccctccggccttgctccactgcccgtcttcccacgtcgctgcatgtagatcttccatagttctttgccaaaaatgtagctcgtccggcgtactttccatattgcagtctcgtcctcacaccgttttagacaaacacaaccgtggtgttatcttcccttaggacaaggaatatgcttcttttttgtcgtcgcatgtttcatcaactgttattggccagtaattgtttcatttctacctctttttttgcaaacagggccatccatttcaccttgttgttactgcgaccttttggtgaactgcacaaatcactttttgcttaagagtgttttgtgcagttgtactaaaatgtcacacgggcaacgtctctacatttcagtgcgactgcacaaagggagattggttttgctctatcctcctcatccaactccaagcctaatcttctcc

SEQ ID NO: 14 - DNA, 16953 bp, Triticum aestivum
gtggtgccgtcctcgctcagcagtatcgcccccatcctgcgcgtcgccgccgagatcgagcccgagcgcccccgcgtcgcctacctctgtaagttcgttgcacttcgaagccgtctccgcgcgtgcctgttttgggagattttcgacaccttttcctggcacagcttggcgcatttggtgtctcggtcggacgaaacgggcaactcgtgatgatatgtttggcgattcacagccgttgtagtgtttatttgggaaggttttgtgctcacgaatctcggaaaatgcatgccgcgtgcgtcggttgttgttgtttttgtttctgggctgctttgattgttacgagtttattaaggggcatgtctgagatttctccgcgtatgatggttttgctgcgttagctggatcttcagctttgatatgtttctccttactcgtgaaactgatcttagaagtagctagcttctctcctgtatgctgcaccatgaggtcttcgtatatgatcgtatcgacgagatggcttgtgtttgagagcgcagattagatttagttgatgcaacttccagattccaacgttctccctcgattgtgttgcttttgcttgaatttgttctctatttaatactcgctggttatgtttaatcattaatttaggctaggatagtgctgcgcgatcagtttgcttggaaagttggaataccatatatcaggtagctcgtgttggttcttcggtgtctctatgtgagatttctccgcctatgtcgatctagctgtacatgctgcgctagattttggattttgtgtgttttctccttttttcagtagataattttgtgacaggtttgcttctgtatgcttgcattattcgtaccaaaccaaatcactcctgtttttcgaagtgcagagccgcagatttgattcatctgatggcttttctgacagttctccctagctcgttttgattgaatatgagtgctctctgtgttgtttgaatcatgtcagatatgacagttttgctccaccagcttttctctgaagaagtgcatatcacgtagcatgaatgggtgcttctggttcgcccttttttcgggatctcaccttgatctgttactctgtgaactaggtcggttctatgccttcgagaaggcgcacaggctggatcaaaactctgttggtcgtggcgttcggcagttcaaaacgtccctgcttcagcgcttagagaaggtgtgagacatctttctctgtctcttcccctccataatttctgcatgatctagctgacttggcgtacatgagggtttgttttgttagttgatacatgtcgacttgatcatgttccctcgctggttttgactgggtcactgtatctggccttcatagatatattatgcaagttgttgaattattattactaccatcttagctttttaactgcttgcaggatatataggtaatatatgagtttgtttggctaataagcctcatggagttaaaaataagctggaagctaatatggacaactctaccttaatttagttatcaaaatgtagtagtggtgcaagttatgttgtccaaatgctcagataaaccaaagggaaataggcaacatgcacatgcagtttaagccatgaaagtatttcctacttttcatttttgtgttgtaatatatatcttgcagatacacgatttttaacttgaagaatatggtcgctggatttagttcagtacacatttgtttcatgataagcttaccaactccatctccaaatacatgacgtagaaagcatgtagtcaaacctctctacctttgaccattaatcaaatcaaattatttagttttttggatagaaattataccattaattcagaacagtttcactatatatctttttacttatacatgttgttcattgaagactcaaaatgcaaaacattatctatcttagaacggtgggagtatatttgattattagtgataagttgataactgtcgatagtcaatctggaaattttattgtgattatcctaatttgatgaccatattgggagttgtgatcagccaagcaaacctacaagctcacttgatcctacctgatagataaagaacattgttccagtaatagaatgttgtgcttcgttctacttattttgtttcaaagtcacaactaaaccttcagttcagattcaacatttatttcgtgtttctgctggggaggggggtgaggtaaaatgacttcagattacaccatcctcctcatgattcgtctcaattgatcagtttgcagtgtagtcattcttgtttgttagagatataatgaggtagccacattctcatctgagcttattttttcagatgatccagttcaaatttaccactttgttgttcctacttgaaatggccagcgaatgtagtagaatggggaaaaaaagcaggggcttagggttcccttgttttcttaattcggattttgcctaacctactcttgaatccaaagatcctgccttaaaatttcccatttcgctcctacgcaatcgaacaggataatagcccgagtctcgcaaagcgattgaagaaaactgatgcccgcgaaattgagagtttctatcaagaatactatgagaattatgtccgcaccctcgacaaaggggaacaagcagacaggtaattcccaatccctaacctatactgcgatctcccctataagtccaatccctcgctatcacgaatccggtcccatgacattgttgcctccaggactcaacttgggaaggcctaccaaacggctggagtcctcttcgaggtgctctgtgccgtcaacaagaatgagaaggttgagcaagttaaccccgaggtttgtgctcactccagccaactgtcgtcgttctttctcagtagaaatatatgttccctctaatgcatcaagtttcttcaaatttcctctgcacagattatgcgctggcacactgaggtgcaagaaaagaaagacatctacgcaccgttcaatattctgcctctcgatgcggccagtgcatcccagtccatcatgcagctggaggaggtatacgactcacaacaatgcagcctatttcctcaaaacaggaacaattgcattatgtactggttcaattaaagaaactgacgtggtcaccgaatgcatcattaacagataaaagcagcagtcgcagctctgcggtacacacggggtttgacctggccttctgcatttgagccggaaaggcagaaggggggtgagctcgatttgctcgattggttgagagctatgtttggctttcaggtctgctacccacttcaggcaaaccaatttcgattggtccattgtattactataagctaacactagcttatcttcttgtgtgcagcgggacagtgtcaggaatcaacgggagcatttgattcttctcctcgctaatgtgcacattagacttgagccaaagcctgaaccacttagcaaggcacactcttctatcgatatttactttgacagcttgactttatgaatatcaatgtgataagcataagatcaatgggtcttgcatgcataaaaatgtggtggtagcttctgacagaacaggatatttgcctgagtttctaatatcttagaaaaaataaagttatttttcattggattagtaaccaattatttaccttcaatgttatgttgtgattgttggtgtaacttgccataacatacacatgcagtttaatttctttcttgatactactacttttgatttccatattcttgacattagaatttgctggactggtgccactactttcaaaaatgccagctgacttattggcattccgccacgaattcgattgattgaactttctgtatgcattattctcaagcaagtgcgtagctaaataatgttaattacacctccatttaccatgctttccttctctcctttttgttcatcgttgcttgatgattgatctcatccgttctttcacccctgaaacagctagatgaccgagctgttgatgtagtgatgaacaagttgttcaacaactacaagaagtggtgcaaatttttgtcacggaaacatagtttgaggtatataattccttaatcagtttcctctttatgtacattattgtgctgataatcttgcaactgcagaaatcctccaggtgctcaattacaggaagttcagcaacgcagaattctgtacctaggtctttatcttcttatctggggcgaatcagcaaatatccggtttatgccagagtgtctttgctacatttttcacaatgtaatttgcacattctttattatcatatcaagtaccaaatctcattgcaaaaatatatctttgaatgattcttctcaatgtgttcagatggcatatgagttgcatgggttgcttgctggaaatgttagtattgtgactggtgaaaatatcaggccatcttatggtggggatgaggaggctttcttaaagaaagtggtcacacctatctatcgtgtcatcagaaaggtactttgataaattaccattacctgaaattccaagttagtttgttctgaatataattgtggtggtttttcaggaggcaggaaaaagccaacatggaaagactgcacattcagcatggtgtaattatgatgatctaaatgagtacttctggtctgtttacagccctattttctggtcacatgccgacagccttttcacacattctctgatagatcctactctgtttcaggacacctgattgtttctcactgggatggccaatgcgagatgatggtgacttcttcaaatccgtgcacgattcaaggcctgtagcagtggtacagttcgatatcagtctgtcagtatctcttccaaagactttgattaggaggagaatactgacaaataactatttgtaggctggaagctcctcaccaaagggttctagtaaaggcacaggcaagacaaattttgtagagacaagatcgttttggcacatctttcgtagttttgaccgaatgtggaccttctatctgttggctctacaggtactgtgccgaatttttcaatgggcttttttctctgtactatggtttttgatggtttgacactgtgaatcttgtaatttttaaaccaaacaggcaatgttgatttttgcttggagcgaatattcagtgactcaaatccttcagaaggacctcttatattctctatcaagcatatttgtcacagcagcatttttacagttcctccaaagtatgtttcccatttcaaatacttgttttatatacaaggcatttttctgatgcatgtaatatttccttttattttttgagaacctgaaatttttagtatgacaagtgatgaatattggcataatttagttccctttatgtatgtactaccttctgcttttgtcaatggcattacggtaagactatgttaagctaggttcccgcgatacagagcactttcacagcagaaagcaactggcaagaacattcatgtagatatctgcaactttaggatctcttctcatatgcattaaactagtgttactataccgagcagtcatgttcttgagatgctccccggtctggaattcttgtggtcttaagagggttctggtgcaataacaaattcgtcatccaaactgaaactgatattttctttaattttgatggcaggtattttagactttattctgaactttcctggccacattagatgcaagttcattgacgtcgtgagaaatattctgaagatagtagttagtgccgcgtgggctgtgattcttcccattttctacatcagcagtcaaacaaaagtcaatttaccactgaaaaatctggacagatggtttggttatgtgaaaggagtgccacaactatatatcctggctgtggcggcgtacctgatacctaatatgattagtgcaatgctcttcctgtttccgatgtttcgaaggtggatagagagctcggattggcatattgttagactactactgtggtggtctcaggtattcaatttaatctattttatttgtttgtgttatattatgtggaaaatcacttatgctgcttatcctcattgtaagtattcatttcaaaatttctgctatgaggcaatttttaataaggtaatatttgataaaatggaactgtattttgtagaatgaatttgtcttgatatccttgccagcttattgtttgtcatagtatcctagagggttgagaaactactgataaaattgtaaattgtaacttgcaagaagagaaaataatccaatgacttctgatgccagggcagagattatcctgctattttgtcattagtttgaaaaaaacacattttagttaaaaagttctcacatgcttgtgaaaattgatagttttcacttctctaacaatatgtgttcatggtagaatggcgcgtagccctagggcccctgctctggcccaaagaggattgtaccaaactccttttcaatacaatgaaacacaaagcttttgcgttttctcgaaaaaaaacaatatgtgttcaactgaacacatttgctatcccagtaatgaaaatgatattgcaagggtacatatggacgaaacagggtggaaaacgtgaaggcaatagattattttgtatgcaatgcgtggaagtaaaataactggatgaatttccctggatcataaggcgctgtacatttattcgtttttcatatttctttcctgtgcggcttgctgtacacgctaattgtataaataactgcagaaacgaatttatgttggccgtggaatgcatgaaagtcaagctgctcttctgaagtaagttactctgttctatttttcttctattagagctttattctgcagaaaaaactcaattctcttctattcaactgagaaggtacacattattttggattttgctgctatgtgcgaagctttccttcagttactttgtccaggtaagttctatgcttagttatttgcaaacatgctttgacgagattgatctgaaacagtttaatttgcagatacaacctcttataaggcctaccaaggatataatgagtgttcataacattcgttatgagtggcatgagttttttccaaacggtaattccaatgcttttttttggtgccgccttcattctggaaccctttttttactgataattcgttgccttttcagcatcatataatatcgctgctatcctatccctctgggcccctgttctgttggtatgcatttatccagcctgctagtgtagtgcctatccagcttatgtattagctgattgtttcgaaactgcattctaaatcttggtttatcaactacaatgcttttattcttgtaggtctatttgatggatacacagatatggtatgccattttctctacaatatccggcggtatgtctggggcacttggacgacttggggaggtaatgataaatctgaactattctctgtaatctgttgttttgctttatactccctccgttcctaaatacttgtctttctagtcatttcaacaagtgactacatacggagcaaaatgagtgaatctacactctaaaatatgtctacatacatccgtatgtagtagtcatttgaaatgtctagaaagacaaatatttaggaacggagggagtagtttagaacttataatgaccataagtgtagggcgccccaagattgatggatagttaaggggctttttctttatattgaggagtaaactgaacgtgtcgaggtctcggtcaattgcatgaaccaaatagctcgtactttataaacataatggcaggccatgtagatggtaatacagttttatgcagaatattttgtttgaggaagcttagcgaggtattttaataagtggaaatcaccttttttttgtttttgcagcctgagaattcagaataaactacattagattataatggtaattttaagtagataaatatggaagtgtattcacaaggcaaatgggatatttagttttaggaggatcctctgggagtcgcacttcagtcttgtttctgttatgctgccgtatttacaagaaaaccttttccaaattcatgaaatgaagcaaaaaatgtattgctggtggcttggtgcatttatagtcggatattctcctttttaaccgtcgacatttttgtattagcactgccttttttactttgttattgccctacagcgttgtgtaactttttctttttgcgagagttaagaagctgaacttcatactgttctggtttctgatggagttgctacactcttgtaccagattcgaacactaggaatgctgagatcacgatttcactctttgcctggagccttcaatacatatttggtgccatcagacaaaggcagaaacagacgtttttcactcgcaaagcgcttcgcagaggtaccaaatgacaataacgaaaattattgtcaagatttcacttataaccccccttaaaagttatgatataatgaagaatttaaagtacaggtttcccccaacaagagaactgaagctgccaagtttgctcaactgtggaatgaagtgatttgcagtttccgcgacgaagattttataagtgataagtgaggcccttagatcatgttcacctagaaaacattatcattgcaatgcagataatggaccttctgttatgcagggagatggacctattggtggttccatactcatcagacccgagcttaaaattgatgcagtggccgttgttcttgcttgctagcaaggtttgacagaacaaatttaatatgtccactctaccttgttacatgtttgtgttcggctcttactggaaatcattttgattgaaatttgcagatacctatagctttagacatggcagcacaatttagaccaagagacagtgatttgtggaagcgtatatgtgcagacgagtatatgaagtgcgctgtaattgaatgctacgagtcattcaaacttgttcttaatttagtggtggttggagaaaatgaaaagaggtatcttcatatacttccatttttcacactgtttcacgtatctctatgtgagaaagacattgatgttgtttgtcatagcttttaggtattcagttaatgataacactaggaaataaataattacatccggaacagacattgtgcactatttttcttcaaaaaaatcgttactagtacctagtaggttataatttctatgattgtctaaggctcctctgttgacgaatccttgccacttttgagcaagacagggccacccaggaaatcatttgtttcgttccaatatgataaaatcattcttaccataaactgggaaacacgcagatcaggacaagtatttttgaacatataaagtggtcagacatggctgaatatttgtagtttgaacatgcacgttttcattcgtagtagtgatgccaaaaatcaatacaaatatattactaaaaatctacaaccctatatgataatggggtttgagagttcaagattacaaatccattacttttaccaataaatatatatctggctagttgcgtatggcggcacatcatcactttcaaacttaagaatcaagatattccaaattgaactagggagaaggactgccaagcacctctatggtgcaatatgcatggaagggaaaccatgattagttgtaactgctaaatgtgcaacgtgtgttagataggcagccttagtactattgaaggcatctgtgtcaatctttcatgtttgttggtttttttactgcattgttcttcatcattgcatgctcactgttatcttgatcttctactgacatgtttgttcactaacttcaacaggattattggcattataatcaaagagattgaagctaacatcgcaaagaatacattccttgccaattttaggatgagcgcattgccagtcctttgcaagaagtttgtggagcttgtatccaccttggtaagcaatgttgttacctctactgaacaccaaccctattgaagattgcattgcttgatatttttttagacaagtaacacgttcgattattgctacaattatctgatcacatctgcagaaagaaagagacgcctcaaaatttgataatgtagtgctattgcttcaagacatgctggaagtgatcacgagggatatgatggtcaatgagatcaagtaataccttctgcaccaatttataatcatacatgtgccttgtcatagaaattggtgactattttttttaacatgtgttgtttacagagaactggctgaatttggtcatgggaacaaggatttagttccaagaagacaactttttgcgggcacaggcacaaaacctgcaattgttttcccaccaccaatttctgcgcagtgggaagaacaagtaataacatcatattcttatttggcttttgtaacaaagaaggttcgctaacttcacctatctacagattaagcgcttgtacctgcttttgactgttaaagaatcagcaatggatgtgcctacaaatcttgaagcccgccggagaatatcatttttcactaattcgctattcatggagatgccacgtgcgcctagagtgcgcaaaatgctctctttcaggtttgtctcgtatgtaaactttcaacatatcacagtatcgtccacttatctaaatataccgcagtatcgaaaatcataatgtctagctaaattagctggattctttggagcctggcagctactggctaatggtccttttactgtgcttcttaaaaagaattatatctgcttgtcaagaaatattttgggctgaattatggtatgttcttaactctgatcagtttgaaagaatagaaaacgtgaatatttttgggcgtggaattgtgaatttgtgctagtcaggaaagaggaaagcaccattaataccaaggagaagcttatcaatgttgggattttaactgaaattattgctgtttgatgaactcgtattctgaactaaatggcggggtggtttctaattttcacggtcagttgtttaggattatttttatgataggttgttattttgatcactgccatcctcatcgtagtctcaaaaaacttcttgctgtcatttgatgtgttgtttaagctaaaaatggaagtattgagtgtcttgagttgcttttgaaactgtctttgagtctgtcactctcattgtctcagcagatttgcatgccccttttcggtattaactacagagtcggagttttgtgtcttgaccagttaacccagtggcgccattatcatactagaaccgaagttcatctacagttttgatcagaattcatttaaagttgcattatattacaactgattctgtactcatcagctcatgttcacttgatggtaaacaaaatttataaacagaagcgttgaacatccacaatgtctggcagtggcactctgtaatcttgttacaagtacatctgtttccaccttaaaggaaacatgcacctagatattctaaaaaaagaacaagtggtgaacttccaagtggagacctgtacaacagaatgtgtgccacccatctttaagtgcattcataatcaaatcaacaacgtcaacaccagaaatatattatcagttcacaacaacaaatatctgataaaccgtatgtttaaatttgttctgtgatcatgagagtttcagcgaaaaagattgggctctagatgattcatatgacacttgttcttcacagtgtaatgacaccatactacagtgaggaaactgtatattcaagaaacgaccttgatctggagaatgaggatggtgtatcaattatattctacctgcagaagatctttccaggttcctttcctgtttgatgtgttttaatgcctacagttctttatgaatttgattgccagccttttgtcttctattcttgataattcttgttatatagatgaatgggataatttcatggaaaggattgattgcaaaagagaaactgaagtttggggaaatgaagaaaatgttcttcaacttcgtcattgggcctctcttagagggcagacactctgtcgaacaggtacttcggccatacccttcaatcttgtcaaatatggatcatttagctgattccgtgtttacatgtttttcttattgcgaatagtgagaggcatgatgtattacaggaaagctttgaagcttcaagcattcctagacatggcttctgaatctggtgagcttcttcaacttccaattcgagcattcctagacatgatgtattgagcattcctagacatgatgtatttagcattcctagacatgttcacaaatataagatgttttggatctttcaatatggactacatgtggactgaaatgagtgaacaaacacactaagcttctatcaataaagttagaacatcttatatttgtgaacggagagggtaccttttacaaatacttcctgattttatattgtagaactaggggagcatccgcaataggtgcaaaaagggggatcttaggaatattttgagagagatgaatagttttttttcatgtaggtagcatcaagagaagagaactaggtctacatattgtagcatctttttagaagttagacccaatcttattggacacttggaaggatacactgaggatgttcttaggaacccccccccccccccccctgtataacaaactcaaactgggcttacaggggacttatacaaagtgtccaacatcaccctcttttgtttgcagagatactagaaggctataaagccattgcagatcccgcagaggaagagaagaaaagccaaagatctctgtcttctcagcttgaagctatagcagatatgaaattcacatatgttgctacgtgccagatctatggaaatcagaaacagtcgggtgatcgacacgcaacagatatactgaacttgatggtgaagtaagtgatctcgatgatctattctagaaattaatatacaacatttggccaagcgcgagatacatcatgtctaccacaatgagcaaaatgttttcttgtataactctttggagactgtgtgtctcggttatgtttatatttagttcacatttaattgataacgagatgttccttgagggaaaattactgaattgtttcttttattcgaattgttatttccctctgtgcaaagtaatttcagttagaatttgaaatgaaactacagttatcctggtctccgcgtggcatacattgatgaagttgaagagagggatggtgagaaggtgcaaaaggtcttctattcggtgctagtaaaagctcttgacaatcacgatcaggtaatcattttacgtgaagcgagttcaaactttcattttggttctgatttaaacctcaatactcagtagtgtgttatgtacttttttgtcctgtgaaggaaatataccgcataaaattgccagggccagcgaaactaggtgaagggaaacctgaaaaccaaaatcacgcgatcatttttacccgcggagaagctttgcaaaccattgatatgaaccaggtgaacttcatggttatagtacgtttttagtaagtaggttgcattctgtcttttgtacttatcaatgctgtttaggacaattatttggaggaagctttgaaaatgcggaatttgctggaagaattcaatgagaaccatggtattcgtcctccaacaattcttggagtacgtgaacacatattcaccggaaggtgtgttttaagctttgcagtaggttttacttagttttctttgtcaaaattgcaaagcaatgcctaacatctgacattgctggattgtagtgtgtcatctcttgcctggtttatgtcaaaccaggaaaccagctttgtcacaataggacagagggttcttgccaatccattgaagtaagtctgaatatactttgatgtgtcctatttgaattaagcacaatccatatttatcatatggagcattttgtgtcatttatatgctgcaatatgagtagggagtgctgagcatctatggtgactatctcctggatgagcgcttatgtttttttatcagctcttgaaatgcacacacatgttttgttggagattttagaggcaataaggccataaatattaaaacaaccaagtgctatttcctggaactttcctggcatcaaatcttttgaagctaaacaatgtcatcaatttaaagtgtatattgtggtccaagtgctgtatatctgacatgctatttcctgaaactttcctggcatcaaagcttttcaagctaaacaacgtcgccaatttaaagggtgtattattgttattgtgtatgtgctgtatatctgacatgctgtttcctgtcagtaaagcttttcgagctaaaaaatgtcgtcaatttaaaatgtgtattatatctaatctaagtgattaatatctgacatgctgcttcctgaaactttcctggcatcagagcttttcaagctaaacaatgttgttaatttgaagtgtgtggtatggtcattggtcattgctatgtatctgacattctcttttctgggcagggtacgttttcactatggacatcctgatgtgtttgataggatttttcacattacaagaggtggaattagcaaggcttcctgtggtataaacttaagtgaagacatttttgctggtatgtacttttccacctattctaactgttacctttggatttttgagggaaatttaagaatggataggtccctaggacatccacatcctcgtatatgtgactcaaactgggtttgacaactgattcacacatgggcctatatgggcctcagacagactactctaaacttgattaagacactgatgctactcttatctaacacattaactcacattccaacatttcccatttctgctcttggacaagacaaacttaaattttctttttcaggtttcaactcaactctgaggcgaggaaatgtcacccatcacgagtacattcaagtcggaaaaggacgtgatgttgggttgaatcaaatttcactctttgaggccaaagtggcgtgtggcaatggagaacaagtgcttagcagagatatctaccgtttgggccaccgctttgacttcttccgaatgctctcatgttacttcacaactgtgggattttatgtcagctcaatggtacaaaacatctacctgcatcacatttgtcttgatttgccatcgtccatgttttttgatgttcttatattactgtgcagatggttgtcataatagtatatgttttcttgtatgggaggctttatttagccttaagtggacttgagtttgcaattatgaagcaagcacgaatgagaggcaaccgtgctcttgaggcagccatggggtcccaatctattgtgcagctaggtcttttgatggccttacccatgtttatggagatcggactggaaaggggttttagaagcgccctgggggatttcatcatcatgcagctacagctatgtgcagtattctttaccttttccctcgggacaaaatcacattattttggccgcacaatcctccatggtggtgcaaaatatagagcaactggcagaggctttgttgttcgccatgtaaagttcgctgaaaattacagaatgtatagcaggagtcactttgtgaaaggacttgagctcatgttactacttgtagtgtatgagctctatggtgatgtggctaccgattccactgcctatgttctgctgacatcatctatgtggttcttggtaatcacatggttgtttgctcctttcctcttcaacccatccggatttgaatggcaaaaggtggtggatgattgggatgattggaacaaatggataagcagccgtggtgggattggtgtgccggccaataaggcctgggagtcgtggtgggaagaggagcaggaacatctgctgtcaacaggcataatcggccgcatatgggaaatcatattatctctccgattcttcatgtttcagtatggtatcatgtaccatctgaatatctctaatggcaacaaaagcatatcagtaagtcatcctttatttttgctagtattttacaactctactcgaactaaatggatttcatgagactgattacatgatctttttgattgtttataatcactgtttactgatacaatttagtgactgtcccttccaaacttgattttgtggcttcagatttatggtctgtcttggctggtcactgtagcagtggtgttagtcctcaaggtaaatttcatttgctttctgttgatgaaatcaataagtatatattggttgacgtatgcctctagtttatgcccttgttatgctgctgatatggtgccatttacttaggtggtatctatgggaagaaagaaatttagtgctgacttccagcttatgttccggctcctcaaattgttcttgttcattggatctgttggaactttggcgattcttttcacccttctgcaccttacagttggtgacatattcgccagcttccttgcctttgcacccacaggatgggccattctgcaggtacgtcatcagcaccaaagctttcctgttgttttgtttcaaggttttactcccagcttatcagtagcgaggactgagtgaggagcagtatcaattcatagggagagagaaacgagagaattttgatcgagttaaagttgctattatcaaaattgacatctttcactggctctaatccgttcggcatcattgcaacagatatcacaggcaagcaagccagtggtgaaggcttttggtctgtggggatctgtgaaggccttgtccagggggtacgagtaccttatggggatcgtgatcttcgtgccagtggcggttctggcatggttcccttttgtctcggagttccagacgaggctgctattcaaccaggcattctcccgaggcctccaaatctctcgcattttggctggcggaaagaagcaaaactga

SEQ ID NO: 15 - DNA, 4560 bp, Triticum aestivum
ctgtttccggtcaataaccaatagtggaacctggatgttcatattggctcctacatattctacgaagatctttatcggtcaaaccgcataacaacatacgttgttccctttgtcatcggtatgttacttgcccgagattcgatcgtcggtatccaatacctagttcaatctcgttactgacaagtctctttactcgttccgtaatacatcatcccgtaactaactcattagttacaatgcttgcaaggcttaagtgatgtgtattaccaagagggcccagagatacctctccgacaattggagtgacagaacctaatctcgaaatacgccaacccaacatgtaccttcggagacacctgtagagcatctttataatcacccagttacgttgtgacgtttggtagcacacaaagtgttcctccggtaaacgggagttgcataatctcatagtcataggaacacgtataagtcatgaagaaagcaatagcaacatactaaacgatcaagtgctaagctaacggaatgggtcaagtcaatcacatcattctcctaatgatgtgatcccgttaatcaaatgacaactcatgtctatggctaagaaacttaaccatgtttgattcaacgagctagtcaagtagaggcatactagtgacactatgtttgtctatgttttcacacatgtattatgtttccggttaatacaattctagcatgaataataaacatttatcatgatataaggaaataaataataactttattattgcctctagggcatatttccttcagtatccacacagcaaagaaaagtcttcttcctcctcccgttggcgccgccgcggatccaccccgcctccgatggcatttggcctgtggaggtgtggaggatcttggccccccgccggcgggagggaccctgttctcatttttgctagactgaacgtcttggttggggctgtgtggcggcggcgatgtcccttggtagcaataatgtctcccacatctcatccccgtctcgatggtgcgaatagcgttgttgaaggatgtgtggaggtgtgtctcagtcggatttcatgggatttggtcggtgctggtcttcgatggatttatttggatccagtttttgttcgtcttcattcgtgtggtttcaggcttgatttttccaatctacaactcccttcatcggcgatggttgctgctctggtgtgctcgtcctttgggaccttagcacaatgactttccaactgtctactacaacaaggtttgcccggctccgatgatggaggggcgatgacggtggcgcgccatcggctcgctccactgtttgtagtcgtcgctaagtggtccatagacctggttgtaatttgtattacctcttgtgttctctatactgccatgattgatgaatagattggaaattcctctctcaaaaaaagaaagaaaaaaactaaaataaaaacgtgaaagaaacaaaacagaaaccaggctggtctttccagtgcgcgtgagccggcccaaccggggttccgttcagcatggggttcgctcctgtctcgcttacaatgccagacatagggcgcccttgagatcagggcaacttagagagagagagagatcaaggcttatccctcccgcccttttctctcggttagttaattagttttgactgagatcagttccaacgataacttgggaaggcgaagccgccgcgcctatatactctccgcctccctctgccccgatcgcgcattcgcccccaacccacaaccaacccttcctccttcctcaagcgcgtcagctcctccgccccggcgacccgagcgagatggtttccgccgacgcagcccgcaacgtcgtcggtattatcgggaatgtcatctccttcggcctcttcctctcccctacgtaagcccccatcccccctcctctaatccgccgcctcttttgtagacagtctagagtaatctatatgcatggatggtgcttgttgcaggccggttttctggcggatcatcaaggccaaggacgtggaggagttcaagccggacccctacctggcgacgctgctcaactgcatgctctgggtcttctacggcctccccatcgtccatcccaacagcatcctcgtcgtcaccatcaacgggatcgggctcgtcatcgagggctcctacctcatcatcttcttcctctactccaccaacaacaagcgggtacgtactaccacatccctaaatctaatcccctcgcccgttggttttcgtctagatagaacaagatctggccctaacccatgcccgtgcgtgcgtgcctccgtgcttgcagctgaagatgataggcgtgctcgccgccgaggcggggttcatggtggccgtcgtgctcggcgtgctcctcggtgcccacacccacgagaagcgctccatgatcgtcggcatcctcggcgtcatcttcggaaccatcatgtatgcctccccgctcaccatcatggtacgtacctacaccctccttcctcgtggatcgatcgtacgtgtgcatgcatgcactctttgatccatgctttaagcccttgatccgtttgctcttaattctggaggcgcagctgttattttatttcgtttcatttgttttgaactttgttagttgtgtgttaatgcatgccgttctggtcgtatggtgtgataatatgcattgtttagaagacatgcgtggttaatctgctagctcttgatcgagtgcctttgagtggctagatgaatgcatgctgctcacctcacacagtagatgtactctccacacacaaattattttacgagacaagatgttgccttgtgtacatattctgtattttgtggctagactcacgtacgggtctggcttcacacacccaagttattttagaagatgcatgctgttcaacttacgtagatctacttcagacatccaagttatttcacaagatgttgttttgtgtgcacatgtttggccaaaaaagctcaaaggtaacgcaaccgctgcgtgtcctttccttgtggatctggacttgcatgccgtgtaaatagctatagccagccaaccaaactttctgttgcacccagccgccaaaatctcgtgttagctgttggagtgacgggtccgcaatcgcatggaagagccgttcatgacataactaaaaacatgtgatccagcacttcatcacaaacgtatgtgccaatgccccgaggatgcatgcatggatatattgcgtgcatgttctcttttgcttcttgtgatccttcactcttgccaaatctatgagttgtgatgttaattaattaaccagtgagtttgtgtacctactcattatatttagatcaggaattcaatgagtcagccttgttaattacctacgtacgtacgtgtgctcttattacctggtgatgtaagcactactaagataagattgcaatacttgattgcagggtaaggtgatcaagaccaagagtgtggagtatatgccattcaccctgtcgctggttaacttcctcaacggctgctgctggttagcctacgcgctcatcaagttcgacctctatgtcacggtcagtacatacatacatacatacatatacacatctcaaacaagtataccgattaaacccagctagctagatttttctgtctcatcgatctaactgccatgcatgcatgcatgcagatccccaatggcctcggcgctttcttcggcctcatgcagctcatcctctacggctgctactacaagagaacccccaaggaggagaagagcgtcgagctgcccaccagcaaccccgccggagccggcaacgtctcggtcaccgtggacagataagcattggcttgcagcagcagcaagcccgccgtcgccaagtgattctagtccggccggcggccgagattttagccctaaacattttgagtagttaaattccggatgatcgatgcttcaacaagtgtggtgtgctagtcttcgttataattagctagtcttgatcgagtgtgcgtttcgtgaaccactgtcgtctgccctcgtgcaaattagaactatattcatgcagaggcgcaacctggaacttaatatatgtagctgtgttgtcccgaataataattacaccacgcttgtcacgtatgtgtactctctgaatctattcttacgtgatgatacgatatcttcatgaattactgtggagctttttaattggtaaggccgcggttgtttttgtggaaccacatttatcttccgttctcttaacaccaccaccaccatgctggcttgggaacgcgacggcaaccctgttgctgagccacgataaccggtgaaaaacgacgtctacaagtaattttacagggatctcgtgttttttgttttagagaaaaagggccacagccctgcctccatttttagagtaccaaaaacaagattttttttgtttgtatggcatttttttggtctgtacattttgtacgcatctcctgattttgtacttgaattttggttgtcattgctcatttggacagacaaatgagcaacatgttttcgccgtcgat

SEQ ID NO: 16 - DNA, 17681 bp, Triticum aestivum
  modified_base (43)..(52): a, c, t or g
gatatgacggcgccgcgcggtggcggggatatgccatcgtcgnnnnnnnnnnccgccgccgcttcgacgtcggagcccaacacgccgtcgtcggcgcacgcgtcggggctcaaccggcgggggtcgaggggcgccgccatggcctccttctccatggaggtcttcgacaacgaggtggtgccgtcctccctcagcagcatcgcccccatcctgcgcgtcgccgccgagatcgagcacgagcgcccccgcgtcgcctacctctgtaagttcgttgcacctcgaagccgtccgcgcgcgtgtgcctgttttgggagattttcgacgccttttcctggcacagcttggcgcatttagtgtctcggtcggacgaaacgggcaattcgtgatgatatgtttggcgactcataaatgtcgcacagccgttgtagtgtttatttgggaaggttttgtgctcacgaatctcgaaaaatctatgccgcgtgcgtcgcttgttgtttttttgtttctgggctgctttgattggtatgagtttaaggggcatgtctgagatttctccgcgtatgttggttttactgcgttagctggatcctcggctttgatatgtttctccttactcgcgaagctgatcctagaagtagccagcttctctcctgtatgctgcaccatgaggtgttcgtatatgatcgaatcgacgagatggcttgtgtttgagagcgcagattagatttagttgatgcaatttccagattccaaccttctccctcgattgtgttgcttttgcttgaatttggtatctatttaatacttgctgcttatgtttgaatcattaatttaggctaggatagtgctgcgcgatcagtttgcttggaaagttggaataccatatatcaggtagctcgtgttggttcctcgcgcggtgtctctatgtgagatttctccgcctatgtcgatctagctgtacatgctgcgctagattttggattttgtgtgttttctccttttttcagtagctaattttgtggcaggtttgcttctgtatgtttttcggagtgcagagctgcagatttgattcatctgatggcttttccgacagttctccctcattttgattgaatatgagcacgctctgtgttgtttgaatcatgtcagatatgacagttttgctctaccagcttttcttcgaagagtgcataactgcatgtcacgtagcacgaatgggtgcttctggttcgccctttttcgggatctcactttgatctgttattctgtgaactaggtcggttctatgccttcgagaaggcgcacaggctggaccagaactccgttggccgtggcgtccggcagttcaaaacgtccctgcttcaacgattagagaaggtgtgagacatctttctctgtctcttcccctccataatttctgcatgatctagctgacttggcgtacacgagggtttgttttgttagttgatacatgtcgatctgatcatgttccctcgctggttttgactgggtgactgtatctggccttcatagatatattatgcaagttgttgaagtattattactactatcttagctttttaactgcttgcaggatatataggcaatatatgagtttgtttggctaataagcctcatggagttaaaaacaagctggaagctaatatggacgacactaccttaatttagttgtcaaaatgtagtagtggtccgagttatatgttgtccaaatgctcacataaaccaaagggaaataggcaacatgcatgcagtttaagacatgaaagtatttcctacttttcatttttgtgttgtaatatatatcttgcagatacacgatttttaacttgaagagtatggtcgctggactttaattcagtacacatttgtttcatgataagcttaccaactccatgtccaaatacatgacgtagaaagcatgtagtcaaacttctctacctttgaccattagtcaaatcaaatcatttagtttttttaatggaaattataccattagatttgtaattcagaacagttttttttttgcgaaggcagaacagtttcactatatatactttttacttatatatgttgttcattaaagactcaaaatgtaaaacattatctatcttagaatggtgggagtatatttgattattagtgataagttgataactgtcgatactcaatctgggaattttattgtcattatcttaatttgatgaccatattgggagttgttatcagccaagcaaacctgcaagctcacttaatcctacctaacagataaagaacactgttctattaatagaatggtgtgctttgttttgttgtgattatcttaatttttaaccatattgggagttgtgatcagccaagcaaaactacaagctcacttgatcctacctgatagataaagaacatggttccagtaatagaatgttgtgcttttctttcaaagtcacaactaaaccttcagttcagattcaacattaattttgtgtttctgctgaggagggggatgaggtaaactgacttcagattacaccatcctcctcatgattcgtctcaactctcaattgatcagtttgcaatggcagattcttgtttgttagagatataatgaggtagccacattctcacctgagcttattttttcagatgatcaagttcaaatttaccactttgttgtttcctacttgaaatggccagcgaatgtagtagaatggggaaaaggagcaggacttagggttcccttgttttcttaatcggattttgcctaacctactcttgaatccaaagatcgtgccttaaaatttcccatttcgctcctacgcaatccaacaggataatagcccgagtctcgcaaagcgattgaagaaaactgatgcccgcgaaattgagagtttctatcaagaatactatgagaactatgtccgcaccctcgacaaaggggaacaagccgacaggtaattcccaatccctaacctatagtgcgatctcctctataagtccaatccctcgctatcacgaatccggtcccatgacattgtcgcctccaggactcaacttgggaaggcctaccaaacggctggagtcctcttcgaggtgctctgtgccgtcaacaagaatgagaaggttgagcaagttaaccccgaggtttgtgctcactccagccaactgtcgtcgttctttctcattagaaatctaggttccctctaatgcatcgagtttctccaaatttcctctgtgcagattatgcgctggcacactgaggtgcaagaaaagaaagacatctacgcaccgttcaatattctgcctctcgatgcggccagtgcatcccagtccatcatgcaactagaggaggtatacgactcgcaacaatgcagcctatttcctcaaaacaggaacaactgcatcatgtactggttcaattaaagaaactgacgtggtcactgaatgcatcattaacagataaaagcagcagtcgcagctctgcggtacacacggggtttgacctggccttctgcatttgagccggaaaggcagaaggggggtgagctcgatttgctcgattggttgagagctatgtttggctttcaggtctgctactcactccaggcaaaccaatttcgattggtccattgtattactaagctaacactagcttatcttcttgtgtgcagcgggacagtgtcaggaatcaacgggagcatttgattcttctcctcgctaatgtgcacattagacttgagccaaagcctgaaccacttagcaaggcacactcttctatcgatatttaccttgacagcttgactttatgaatatcaatgtgataagcataagatcaatgggttttgcatgcataaaaatgtggtggtagcttctgacggaacaggatatttgtctgagtttctaatattttagaaaaaataatgttatttttcattggattagtaaccaattatttaccttcaatgttatgatgtgattgtttgtgtaacttgccatataacatacacatgcagtttaatttctttcttgatactactacttttgatttccatattcttgacattagaatttgctggactggtgccactacttgcaaaaatagctgacttgttggcattctgccacgaattcgattgattgaactttctgtatgcattattctgaagcaagtgcgtagctaaataatgttaattacaccctccatttaccatgctttccttctctcctttttgttcattgttgcgtgatgattgatctcatccattctttcacccctgaaacagctagatgaccgagctgttgatgtagtgatgaacaagttgttcaacaactacaagaagtggtgcaaatttttgtcacggaaacatagtttgaggtatataattccttaatcagtttcctctttatgtacattattgtgctgataatcttgcaactgcagaaatcctccaggtgctcaattacaggaagttcagcaacgcagaattttgtacctaggtctttatcttcttatctggggcgaatcagcaaatatccggtttatgccagagtgtctttgctacatttttcacaatgtaatttgcgcattcttattatcatatcaagtaccaaatctcattgcaaaaatatatctttgaatgattcttctcaatgtgttcagatggcatatgagttgcatgggttgcttgctggaaatgttagtattgtgactggtgaaaatatcaggccatcttatggtggggatgaggaggctttcttaaagaaagtggtcacacctatctatcgtgtcatcagaaaggtactttgagaaattaccattacctgaaattccaagttagtttgttctaaatataattgttgtggtttttcaggaggcaggaaaaagccaacatggaaaaactgcacattcagcatggtgtaattatgatgatctaaatgagtacttctggtctgtttacagccctattttctggtcacatgctgacagcttttttacactttctctgatagatcctactctgtttcaggacacctgattgtttctcactgggatggccaatgcgagatgatggcgacttcttcaaatccgtgcatgattcaaggcctgtagcagtggtacagttcgatatcagtctgtcagtatctcttccaaagacttcgattaggaggagaatactgacaaataactatttgtaggctggaagctcctcaccaaagggttctagtaaaggcacaggcaagacaaattttgtagagacaagatcgttttggcacatctttcgtagttttgaccgaatgtggaccttctatctgttggctctacaggtactgtgccgaaattttcgatgggcttttttctctgtactatggtttttgatggtttgacactctgtgaatcttatatttttaaaccgaacaggcaatgttgatttttgcttggagtgaatactcagtgactcaaatccttcagaaggacctcttatattctctatcaagcatatttgtcacagcagcatttttacagttcctccaaagtatgtttcccatttcaaatacttgttttatatacaaggcatttttctgatgcatgtaatatttccttttattttttgagaacctgaaatttttagtatgacaagtgatgaatattggcataatttagttctctttatgtatgtactaccttctgcttttgtcaatggcattacggtaacactatgttaagctaggttcccgtgatacagagcactttcacagcagaaagcaactggcaagaacattcatgtagatatctgcaactttaggatctcttctcatatgcattaaactagtgttactataccgagcagtcatgttcttgagatgctctccgatctggaattcttgtggtcttaagagggttctggtgcaataacaaattcgtcatccaaactgaaactgatattttctttgattttgatggcaggtattttagactttattctgaactttcctggccacattagatgcaagttcattgacgtcgtgagaaatattcttaagatagtagttagtgccgcgtgggctgtgattcttcccattttctacatcagcagtcaaacaaaagtcaatttaccactgaaaaatctggacagatggtttggttatgtgaaaggagtgccacaactatatatcctggctgtggcggtgtacctgatacctaatatgattagtgcaacgctcttcctgtttccgatgtttcgaaggtggatagagagctcggattggcatattgttagactgctactgtggtggtctcaggtattcaattcaatctattttatttgtttatgttctattatgtggaaaattacatatgcagcttatcctcattgtaaatattcatttcaaaatttctgttatgaggcatttttaataaggtaatatttgataaaatggaactgtattttgtagaatgaatttgtcttgatatccttgccagcttattgtttgtcatagtatcctagagggttgagaaactactgataaattgtaaactgtaactagcaagaagagaaaataatccaatgacttctgatgccagggcagagattatcctgctattttgtcattagtttgaaaaaaagcattttatggttagttaaaaagttctcccatgcttgtaaaaattgatagttttcacttctctaacaatatgtgttcaactgaacacatttgctatcccagtaatgaaaatgatattgcaagggtatacagatggacaaaacagggtggaaaacgtgaaggcaatagattattttgtatgcaatgcgtggaagtaaaataactggatgaatttccctggatcataatgcgctgtacatttattcgtttttcatatttatttcttgtgcggcttgctacactacactaatggcaatgcccattttccttgttcttgctgtacatgctaattgtataaataactgcagaaacgaatttatgttggccgtggaatgcatgaaagtcaagctgctcttctgaagtaagttactctgttcaatttttcttctgttagagctttattttgcagaaaaaactcaattctcttctattcaactgagaaggtacacattattttggattttgctgctatgcgcgaagctttccttcagttactttgtccaggtaagttccatgcttagttatttgcaaacatgctttgacgagattgatctgaaacagtttaatttgcagatacaacctcttataaggcctaccaaggatataatgagtgttcataacattcgttatgagtggcatgagttttttccaaacggtaattccaatgcttttttttgggtgccgccttcattctggaacccttttttactgataattcgttgccttttcagcatcatataatatcgctgctatcctatccctctgggcccctgttctgttggtatgcactgatccagcctgctagtgtagtgcctatccagctatgtattagctgagaagtagcttcatttattcccatttctttagaaactgcattctaaatcttggtttatcaactacaatgcttttattcttgtaggtctatttgatggatacacagatatggtacgccattttctctacaatatccggcggtatgtctggggcacttggacgacttggggaggtaatgatagatctgaactattctctgtaatctgttgttttgctttatagtttagaacttataatgaccataagtgtagtgcaccccaagattgatggatagttaacgggctttttctttatattcaggagtaaactgaacgtgtcgaggtctcggtcaattgcatgaaccaaatactccctccgtccgaaaatacttgtcatcaaaatggataaaaggggatgtatctagatgtattttagttctagatacatctctttttatccattttgatgacaagtattttcggacggagggagtagctcgtactccctccgtaaactaatataagacgctcttatattagtttacagagggagtactttataaacataacggcgggctatgtagatggtaatacagttttatgcagaatattttgtttgaggaagcttagtgaggtattttaatagtggaaatcaccttttttgtttttgcagcctgagaattcagaataaactacattagattataatggtaatttcaagtagataaatatggaagtgtattcacaaggcaaatgggatattcatttttaggaggatcctctgggagtcgcacttcagtcttgtttctgttatgctgccgtatttacaagaaaacctttttcatattcatgaaatgaagcaaaaattctattgctggtggcttcgtgcatttatagtcggatattctcctttttaaccgtcaacatttttgtattagcactgccttttttactttgttattgccctacagcgttgtgtaactttttctttttgcgagagttaagaagctgaacaaaatactgttctggtttctgatggagttgctacactcttgtaccagattcgaacactaggaatgctgagatcacgatttcactctttgcctggagccttcaatacatatttggtgccatcagacaaaggcagaaacagacgtttttcactctcaaagcgcttcgcagaggtaccaaatgacaataacgaaaattattgtcaagatttcacttataaccccccttaaaagttatgatataatgaagaatttaaagtacaggtttcccccaacaagagaactgaagctgcgaagtttgctcaactgtggaatgaagtgatttgcagtttccgcgacgaagattttataagtgataagtgaggcccttagatcatgttcacctagaaaacattatcattgcaatgcagataatagaccttctgttatgcagggagatggacctattggtggttccatactcgtcagacccgagcctaaaattgatgcagtggccgttgttcttgcttgctagcaaggtttgacagaacaaatttaatatgtccagtctaccttgttacatgtttgtgttcggctcttactggaaatcattttgattgaaatttgcagatacctatagctttagacatggcagcacaatttagaccgagagacagtgatttgtggaggcgtatatgtgcagacgagtatatgaagtgcgctgtaattgaatgctacgagtcattcaaacttgttcttaatttagtggtggttggagaaaatgaaaaaaggtatcttcttatacttccatttttcactgtttcacgtatctctatgtgagaaagacattgatgttgtttgtcatagcttttaggtattcagttaatgataacactaggaaataaatacttacatccggaatagacattgtgcactatttttcttcaaaaaaatcgttactagtacctagtaggtttcttttgcccgcacagtacctatagggtataatttctatgattgtctaaggctcctctgttgacgaatccttgccacttttgagcaagacagggccacccaggaaatcatttgtttcgttccaatatgataaaagcattcttaccataaactgggaaacacgcaggtcaggacaagtattttttaacatataaagtggtcagacatggctgaatatttgtagtttgaacatgcacgtttccattcgtagtagtgatgccaaaaatcaatacaaatatattactccctccgtccggaaatacttgtcctataaatggataaataagtctagatacaaccatttctaggacaagtatttttggacggagggagtactaaaaatctacaaccctatatgataatggggtttgagagttcaagattacaaatccattacttttaccaataaatatatatatatctggctagttgcgtatggctgcacatcatcactttcaaacttaagaatcaagatattccaaactgaactagggagaagaactgccaaacacctccattgtgcaatatgcatggaagggaaaccatgattagttgtaactgctaaatgtgcaacgtgtgttagataggcagccttagtactattggaggcatctgtgtccatctttcatgtttttttttactgcattgttctttatcattgcatgctcactgttatcttgatcttctactgacatgtttgttcactaacttcaacaggattattggcattataatcaaagagattgaagctaacatcgcaaagaatacattcctcgccaattttaggatgagcgcattgccagtcctttgcaagaagtttgtggagcttgtatccaccttggtaagcaatgttcttacctctactgaacaccaaccctattgaagattgcattgcttgatatttttttagacaagtaacacgttcaattattgctacgattatgtgatcacatctgcagaaagaaagagacgcctcaaaatttgataatgtagtgctattgcttcaagacatgctggaagtgatcacgagggatatgatggtcaatgagatcaagtaataccttctgcaccaattttaatcatacatgtgccttgtcatagaaacttatgactatatattttttaacatgtgttgtttacagagaactagctgaatttggtcatgggaacaaggatttagttccaagaagacaactttttgcgggcacaggcacaaagcctgcaattgttttcccaccaccaatttctgcgcagtgggaagaacaagtaataacatcacattcttatttggcttttgtaacaaagaaggttcactaacttcacctatctacagattaagcgcttgcaccttcttttgactgttaaagaatcagcaatggatgtgcctacaaatcttgaagcccgccggagaatatcatttttcactaattcgttgttcatggagatgccacgtgcgcctagagtgcgcaaaatgctctctttcaggtttgtctcgtatgtaaactttcaacatatcacagtgtcgtccacttttctaaatatatcgcagtattgaaaatcataatgtctagctaaattagctggattcattggagcctggcagctactggctaatggtccttttactgtgcttcttaaaaagaattatatctgcttgtcaagaaatattttgggctgaattatggtatgttcttaactctgatcagtttgaaagaacagaaaacatgaatatttttgggcgtggaatgtgaatttgtgctagtcaggaaagaggaaagcaccattaagaccaaggagaagcttatcaatgttgggattttaactgaaatttttgttgtttgatgaactcatattctgaactaaatggcgggggtggtttctaatttttacggtcagttgtttaggatttttttaattacaggttgttattttgagcactgccatcctcatcgtagtctcaaaaaacttcttgctgtcatttgatgtgtcgtttaagctaaaaatggagtgatgccattatggtattgagttgcttttgaaactgtctttgagtctgtcactctcattgtctcagcagatttgcatgccccttttcggtattaactacagactcggagttttgtgtcttgaccagttaacccaatggcgccatgatcatactagaaccgaagttcatctacagttttgatcagaattcatttaaagttgcattatattacaactgattctgtactcatcagctcatgttcgcttgatggtaaacaaaatttataaacagaggctcatgttcgcttgaacatccacaatgtctggcagtggcactctgtaatcttgttacttgtacaagtacatctgtttccaccttacaggaaaaatgcacctagatattctaaaaaaaagaacaagtggtgaacttccaggtggagacctgtacaatagaatgtgtgccacccatctttaagtgcattcataatcaaatcaacaacgtcaacaccagaaatatattatcagttcacaacgacaaatatctgataaaccgtatgtttaaattttctgtgatcataagagtttcagcgaaaaagattgggctctagatgattcatatgacacttgttcttcacagtgtaatgacaccatactacagtgaggaaactgtatattcaagaaacgacctggatctggagaatgaggatggtgtatcaattatattctacctgcagaagatctttccaggttcctttcctatttgatgtgttttaatgcctacagttctttatgaatttgattgccagctttttgtcttctattcttgataattcttgttatatagatgaatgggataatttcatggaaaggattgattgcaaaagagaaactgaagtttggggaaatgaagaaaatgttcttcaacttcgtcattgggcctctcttagagggcagacactatgtcgaacaggtacttcggccatacccttcaaccttgtcaaatatggatcatttagctgattccgtgtttacatgtttttcgtattgtgaatagtgagaggcatgatgtattacaggaaagctttgaagcttcaagcattcctagacatggcttctgaatctggtgagcttcttcaacttccaattcgagcattcctagacatgatgtatttagctttcctagacatgttcacaaatataagatgttttggatatttcaatatggactacatgtggactgaaatgagtgaacaaacacactaagcttctatcaataaagttagaacatcttatatttgtgaacggagagggtaccttttacaaatacttcctgattttatattgtagaactaggggccctagtctaggggagcatccgcaataggtgcaaaaagggggatcttaggaatattttgagagagatgaatagttttttttcatgtaggtaccatcaagagaagagaattaggtctacatattgtagcatctttttagaagttagacccaatgttattggacacttggaaggggtctatacactgaggatgttcttaggaacaaactcaaactgggcttacaggggacttatacaaagtgtccaacatcaccctcttttgtttgcagagatactagaaggctataaagccattgcagatcctgcagaggaagagaagaaaagccaaagatctctgtcttctcagcttgaagctatagcagatatgaaattcacatatgttgctacgtgccagatctatggaaatcagaaacagtcgggtgatcgacacgcaacagatattttgaacttgatggtgaagtaagtgatctcgatgatctattctagaaactaatatacaacatttggccaagcgcaagatacatcatgtctaccccaatgagcaaaatgttttcttgtataactctttggagactgtgtgtctcggttatgtttatatttagttcacatttaattgataatgagatgttccttgagggaaaattttgaattgcttcttttattcaaattgttatttccgtctgtgcaaagtaattttagttaaaatttgaaactacagttatcctggtctccgcgtggcatacattgatgaagttgaggagagggatggtgagaaggtgcaaaaggtcttctattcggtgctagtaaaagctcttgacaatcacgatcaggtaatcattttacgtgaagcgagttcaaactttcattttggttctgatttaaacctcagtactcagtagtgcgttatgtacttttttgtcctgtgaaggaaatataccgcataaaattgccagggccagcgaaattaggtgaagggaaacctgaaaaccaaaatcacgcgatcatttttacccgcggagaagctttgcaaaccattgatatgaaccaggtgaacttcatggttatagtacggtagtacctttcgggtaagtaggttgcattctgtcttttgtacttatcaatgctgtttaggacaattatttggaggaagctttgaaaatgcggaatttgctggaagaattcaatgagaaccatggtattcgtcctccaacaattcttggagtacgtgaacacatattcaccggaaggtgtgttttaagcttttgcagtaggttttacttagttttctttgtcaaaattgcaaatcaatgcctaacatctgacattgctggattgtagtgtgtcatctcttgcctggtttatgtcaaaccaggaaaccagctttgtgacaataggacagagggttcttgccaatccattgaagtaagcctgaatatactttgatatgtcctatttgaattaagcgcaatccatagttatcatatggagcattttgtgtcatttatatgctgcaatatgagtagggagtgctgagcatctatggtgactatctcctggatgagcccttatgttttttgtatcagctcttgaaatgcacacacatgtttgttggagattttagaggcaataaggccataaatattaaaacaaccaagtgctatttcctggaactttcctggcatcaaatcttttgaagctaaacaatgtcatcaatttaaagtgtatattgtggtctaagtgctgtatatctgacatgctatttcctgaaactttcctggcatcaaagcttttcaagctaaacaacgtcgccaatttaaagggtgtattattgtgtatgtgctgtatatctgacatgctgtttcctgtcagtaaagctttttgagctaaaaatgtcatcaatttagaatgtgtattatatctaagtgatttatatctgacatgctgtttcctgaaactttcctggcatcagagcttttcaagctaaacaatgttgttaatttaaagtgtgtggtatggtcattggtcattgctatgtatctgacattctcttttctgggcagggtacgttttcactatggacatcctgatgtgtttgataggatttttcacattacaagaggtggaattagcaaggcttcctgtggtataaacttaagtgaagacatttttgctggtatgtacttttccacctattctaactcctgtggatttttgagggaaatctaagaatggataagtccctgggacatccacatcctcatatatgtgactcaaactgggtttgacaactgattcacacatgggcctatatgggtgtcatgtggggcacgtcctacaggcgtgggccacgcggccaggagcagcagccgtcggccgcatcaggcgaggcgtaggctgggcaggagtcctggtcctgatacattagttcctagaataaaagactagtttgttacgcataggtttctagtttgttagcagcccatggggcctttatatatcgtataatcagcaccctttaagggcaagcaataaagttattatctcgtacctcttcctctgtctcctatcctctcctcccgcaccattgagcagccaggcaaaaaccctagcgctcctatccatcgagactacgaactacgtagtcgaggccccgctgtcttgggcactgaggcccttgacaatgggcctcagacagactactctaaactcgattaagacactgatgctactcttatctaacacattaacgcatattccaacattcccatttctgctctggaacaacacaaacttaaattttctttttcaggtttcaactcaactctgaggcgaggaaatgtcacccatcacgagtacattcaagtcggaaaaggacgtgatgttgggttgaatcaaatttcactctttgaggccaaagtagcgtgtggcaatggagaacaagtgcttagcagagatatctaccgtttgggccaccgctttgacttcttccgaatgctctcatgttacttcacaactgtgggattttatgtcagctcaatggtacaaaacatctacctgcatcacatttgtcttgatttgccatcgtccatgttttttgatgttcttattactgtgcagatggttgtcataatagtatatgttttcttgtatgggaggctttatttagccttaagtggacttgagtttgcaattaggaagcaagcacgaatgagaggcaaccgtgctcttgaggcagccatggggtcccaatctattgtgcagctaggtcttttgatggccttacccatgtttatggagatcggactggaaaggggttttagaagcgccctgggggatttcatcatcatgcagctacagctatgtgcagtattctttaccttttccctcgggacaaaatcacattattttggccgcacaatcctccacggtggtgcaaaatatagagcaactggcagaggctttgttgttcgccatgtaaagttcgctgaaaattacagaatgtatagcaggagtcactttgtgaaaggacttgagctcatgttactacttgtagtgtatgagctctatggtgatgtggctaccgattccactgcctatgttctgctgacatcatctatgtggttcttggtaatcacatggttgtttgctccattcctcttcaacccatccggatttgaatggcaaaaggtggtggatgattgggatgattggaacaaatggataagcagccgtggcgggattggtgtgccggccaataaggcctgggagtcgtggtgggaagaggagcaggaacatctgctgtcaacaggcatcatcggccgcatatgggaaatcatattatctctccgattcttcatgtttcagtatggtatcatgtaccacctgaatatctctaatggcaacaaaagcatatcagtaagtcatcctttatttttgctagtattttacaactctcctcgaactaaatggatttcatgagactgattacatgaactttttgattgtttataatcactgtttacggatacaatttagtgactgtcccttccaaatttgattttgtggcttcagatttatggtctgtcttggctggtcattgtagcagtagtgttgatcctcaaggtaaatttcatttgcttgctgtcgatgaaatcaataagtatatattggttggcgtatgcctctagtttatgtccttgttatgctgctgatatggtgccattttcttaggtggtatctatgggaagaaagaaatttagtgctgacttccagcttatgttccggctcctcaagttgttcttgttcattggatctgttggaactttggcgattcttttcacccttctgcaccttacagttggtgacatattcgccagcttccttgcctttgtacccacaggatgggccattctgcaggtacgtcatcagcaccaaagctttccttttgttttattttaaggttttactcccagcttatcacgagcaaggagcgaggagtgaggagcagtatcaattcatagggagagagaaacgagagaattttgatcgagttaaagttgctattatcgaaattgacatctttcactggctctaatcccttcggcatcattgcaacagatatcacaggcaagcaagccagtggtgaaggctttagggctgtggggatctgtgaaggccttgtccagggggtacgagtaccttatggggatcgtgatcttcgtgccagtggcggttctggcatggttcccttttgtctcggagttccagacgaggctgctattcaaccaggcattctcccgaggcctccaaatctctcgcattttggctggcggaaagaagcagaactga

SEQ ID NO: 17 - DNA, 21203 bp, Triticum aestivum
  modified_base (567)..(1407): a, c, t or g
  modified_base (16757)..(16757): a, c, t or g
  modified_base (17291)..(17566): a, c, t or g
  modified_base (18044)..(18044): a, c, t or g
  modified_base (18934)..(18934): a, c, t or g
actagcaacgagagggaaggagtgcatctacatacccttgtagatcgcgagcggaagcgttcaaaagaacggggttgatggagtcgtactcgtcgtgatccaaatcaccgatgatcctagcgccgaacagacggcacctccgcgttcaacacacgtacggagcagcgacgtctcctccttcttgatccagcaagggggaaggagaggttgatggagatccagcagcacgacggcgtggtggtggaagtagcggggatcccggtagggcttcgccaagcactaacgggagggagaggaaggcgccaggggcttggattactgctgtcctcccttccccccactatatatagggccaagggagaggggggggcgcagctttggcccttcctccaaggaagggtgcggccagggaggagtccttcctccccaaggcacctcggaggtgccttccccctttaggactctcccctcttcttatctcttggcgcatgggcctcttggggctggtgcccttggaccatataggccaaggcgcaccccctacagcccatgtggccccccggggcnnnnnnnnnnnnnnnnnnnnnnnnnnnnnnnnnnnnnnnnnnnnnnnnnnnnnnnnnnnnnnnnnnnnnnnnnnnnnnnnnnnnnnnnnnnnnnnnnnnnnnnnnnnnnnnnnnnnnnnnnnnnnnnnnnnnnnnnnnnnnnnnnnnnnnnnnnnnnnnnnnnnnnnnnnnnnnnnnnnnnnnnnnnnnnnnnnnnnnnnnnnnnnnnnnnnnnnnnnnnnnnnnnnnnnnnnnnnnnnnnnnnnnnnnnnnnnnnnnnnnnnnnnnnnnnnnnnnnnnnnnnnnnnnnnnnnnnnnnnnnnnnnnnnnnnnnnnnnnnnnnnnnnnnnnnnnnnnnnnnnnnnnnnnnnnnnnnnnnnnnnnnnnnnnnnnnnnnnnnnnnnnnnnnnnnnnnnnnnnnnnnnnnnnnnnnnnnnnnnnnnnnnnnnnnnnnnnnnnnnnnnnnnnnnnnnnnnnnnnnnnnnnnnnnnnnnnnnnnnnnnnnnnnnnnnnnnnnnnnnnnnnnnnnnnnnnnnnnnnnnnnnnnnnnnnnnnnnnnnnnnnnnnnnnnnnnnnnnnnnnnnnnnnnnnnnnnnnnnnnnnnnnnnnnnnnnnnnnnnnnnnnnnnnnnnnnnnnnnnnnnnnnnnnnnnnnnnnnnnnnnnnnnnnnnnnnnnnnnnnnnnnnnnnnnnnnnnnnnnnnnnnnnnnnnnnnnnnnnnnnnnnnnnnnnnnnnnnnnnnnnnnnnnnnnnnnnnnnnnnnnnnnnnnnnnnnnnnnnnnnnnnnnnnnnnnnnnnnnnnnnnnnnnnnnnnnnnnnnnnnnnnnnnnnnnnnnnnnnnnnnnnnnnnnnnnnnnnnnnnnctatgtatccacacatgtatctgagtttcctatcaatacaattctagcatggataataaacaattatcatgaacaaggaaatataataataacctatttattattgcctctagggcatatttccaacagctagagggatggccggggcggcggctagaccggcgggggggggggggggggggggggggggggggggggggggggggggggggggggggggggtgttctgtggagggtggggcggcgaggcggtcgcgggtggcggtggccggcggttcggccggcggcatgttttggcggtcggggagctgaggaattagaagatctagctgccacacgattttaacccaacggtccacgaatcgactgatgcaaactcaaaaatccagtcgactgaactggagccatacccttgcaaaactgtccaattagggcgtttgttttccaaagatgtcgtgttctccgatgctttaatctgcataaactgcagcgcatgtatgtgtggctactaaatgagcataaacggcctgtaatttttcttttagtacgtctgtgaatctaaaagtgtggtgaagaggaataaaacggaggtagcaaaccgttcaaaagaagaagaaaattatacaggcccaaaaaaaaagaaaaggagggagtacaaattatttttctttcctactacctggtcattttctgaaccactcatctatttccctccaacagagaaaggaaaactggcaaaggtgagaaagtgtacattgaaattgtaagaaaatctcaaaacaagatgcacacgggaaaggcatgcacggctgaccagacgtcacgcggacgacttgcactcgcatcgtgcatgtctgcctctctctttctgtaacaaagctaggccacaggggagcagcatctacatattcttgtgcccactgacattgctgcaaacggatgtggttcttccattccctccctggctttttaagtattgtggacatcggtttgagcgacaattaatatttgatggagacagcactatttaatgctggatcatgcacgttaataggatacggacacacacacgtaggtgctgtgccgtgaggatattaggtcatttgaatatcaaatctacagagaaagggacagtgtcgcagttaatggaggaggaatgttgccggatcctcgcacatcacgtctcgtggatgctgcatgaacataattctcttactccaatataattcacttttttcactttctgacttttctcgcgatataattcgattaacaatcatggtggtctagcaagcagctagtcccttttgggcgagtagctagtgcattcttatgctgtctagtgtctatatgccaaacggacacaaagttggttaatcaggacagctggctaaggtagataggagtactactagataatatacgtggcggagtaaagctagtgcggtggctgattctccatcagcctgaattaaacagtggctcatacatatgctcgtcagctagctccccggtcgatcggtggtaatcctccccgcgctgattggcagccggctggtctcgttttcagctgctgtgaagtgcagttttacttgttccgcgtgcattgtcagatttctgtgaattactaataattaaccggtcttatcttaggcaaactactgtattagcctgttcctgcgtgcacctccgccatggctgcgtgccgctgccggccgggccagtggtgaacaggcctgcctgtccctagagaccgaccaagaccacgggaggtccgggagccgtccagaaatggccatgggatcgatgcgtcctgtcgtttaacctgtgtgtcgccgctttgctttggctttacgccaagcaggttagctagaccgtttcagtttcatgtcaggtcagcggtttcctctctctctcgtgctctcgtggagtaccagagtagggcctcaacctcaagccctcaactgtgccactgtagcagtacagctgcgtgcaagtagtccgtagagcacatgcatttgatgcatgtacgcgcactgtgcaggagctgcgggcagggggcagcggcagcgggtcaggccggagaaaaggagactttcggcctcgcctctcctttcaaaaagggatattttttttacctaaatgctagatcgtgcagttgcgcgattttgttatggctagcgcacgcgctatacgacaagaaattgcatgcttctgttcttcgcctttctctcccgcacgtggtccctaatacacaaccaacgaaaagaaattaggaaaatcagttggtccaccgtgtctcagtgcgcacatcctgtgatttcctagcaagatcccatcttgtatgcatttaatttgcgttttcaaactttcaaaaagctataacttctgaaccgatcatcgaaattaagatttgttttcacggctaggttcctcgctacgagctctttaaaactagaccccatatgagtacgttttgactaacttttttatgagccacattgggtgaaacggaagcaactttagtgctacaggaaagcaacgtactgttagtctgcgtaggaagactgtctatcatcgaaaatcccttcgaagttatctaccatgactatcaagttaactagcttcatctctaagtgtcctaccataactagtttagtttcgcctccaagttgatagtattgtcggcaacttagtttttgaggtaggctaaaatttatcctaagttgcctgccatgactagggagtagcttaacatcattcttagttgcataaaatgcttttcggtatggtaagcaacttagtttcatagatatgcaacttagtaacacttattccaatgtattgtaggcaactaaaacagtaatgacaggaaactaagcatcaccgttaggcaacttcagagtgtttgtaggcgatttagaataacaatgataagcaacgtcataatatttgtaggcaactaatttgaaaagttaggcaactgatcaacaattgtaggcaactgtgcatcaatgtaggcaatttatagtattacacttatggacaacttttcagtgtattgtaggcaactgaaacagtagtggcaggcaactaagcatcaccgttaggcaacttcagagtgtttgtaggcgacttaaaaaaacaatgataaccaacgtcacaatatttgtaggcaactaatttgaaaagttagacaactgatcagcaatggtagcaattgtgcatcaatgatagacaatttacaatatttataggcaactgagcagcgatgataggcaactgattaccaatagcaggcaactgggcatcaatggtaggcgattgcatagtatttataggcaactgagcatcaaccgtagacaattgagcagccatgcattataggcaagttgggataatgttaccaaaattcatatgtacaaatagtgcagtgaagttgcttacatgtagcactaaagttgcctcatattttcgtgtgtgtttctcggcttgacacaaaccaacctaatagacagtcctacaagaacgaaaacgggagtttgttttcctatagtacactaagaggtgaatctagtcaattggtagtcatgataagaaatttagaaagactcctcgctgataggtagtcatactagagaataaaaatgagttgctttcttatagcactaaagttgtctccgtagcacccaaagttgctctaattttttttgccgaaacctaccgatatgggatctagttttgaagaactcattgtgagaaatctaatggtgaaaacggaactggatgttcatgcctgaatcaaaagttacgacttttaaaactttttgaaccccaaataaatgcacatgggacaagatgtaggctgattccatcggtacggctgtgcactacaggatgtggctagacagattcctttcctagtatacaccaatggacacaaggacatatacttttgaagcatgaattttccgtggtccaaataattaattttccattgttgaaattaaatgtgtgattgtgcaaacaataaatttgccattgtccaagtatataattttgccatggtttgaagggtgagtttttcatgttctagaaaaaataactttgttatggttaaaaaaaagtaaatttcccatggtctaacttacaaagttgttggtccaaacaacaactttgccaaggttggaaaaataaatttgccatgtttcaaaaataattgaccatgtaccagaaattacccatcatggtccagcaaaataaatttgccatggtccaatataaagttccatgctccaaaaaataaatttgccatggtaaaaaaaagtctgggatggtccaaatataaatttgcgacggattgttaagcaaatttgccatgctataaaaaaagaaattttccatgatccaaaataatcatgctaaaatgccattgtagatcatggcaaatgtggattaaaaagaacatgtataggggaaactatacttatcatggcatatgtgcgacccattattaatgcaaacagtgtatttgtctaggtttcattaaaaaccgtgatataattgataagactcgactagacgacgcatcgctggttagtctgatcttccacggtacttgcgaaataacaatgaacgacggcaacaatagtcgcagaagaaatagacgtagaagaaaagaaaccttcagatcaaacgagtaaggtaagaagccaaatgagaagacttgcaccaaaactgatatgtgatcagacacgagcacagcagcaacgaatctctaggattcgcaagaacacatccttggtgcctcctgacgtgaggccttttctgttgtttttattcaactccaaactaaaacaaatctgcccccggtacaaaagtgaatatgcctaatatataggctgacacaaaccagccgcaaacagcgtaccaaacccgtccgtcgcaccgttttgcaaaaacgcccctgcgttttcatgaaatcaacccgcagtccggatttaagtcacaccgaaccgttattttacaggttttcgaaaacaaccctgacgttttaggtattccatccgcggatcatatttaagtcaaacaaatgcttttctaaaccatccatatcttttaaaccgtaactccaatttaaacatgttatacatgaaatttgattagaaaaatatgtagaatatgaatataagattattttaacctgttaagtatttataaatattattttggaagatatttaagtcaaacaaatggttttctaaattatatgtatcttttaaaccgtaactccgattttaaaatgttatatatgaattttgattagaaaaatgtgtgaaatctgaatatgatgttaattttacctgttaaatattttttagatattgttttggaagcaaacttataactatagcgcacgatccatttttctttcgtacaggcggcgatccggattgcaaataaacacccactatagtcatataggaaaaagaaaacatcgagaactacacatgcatacctctgaatacatcgcaggggaaaacaacagatttctcatcacgagtgtgagagaaagcgagagagagagagagagagagagagagagagagagagagagagagagcgggagagagagagagagggagagagagacgtcttaggattaaccacattcaaacacgttttggtttgtgtgaacactaaggccatcgccggcgagggtgagaagaagaataagcggcaacacaaatatgatgcatcgctaaaataaaggagatgaacctattgtggtcttgagtgatggttgttcagttaagagtgtgtgttatgttttttttcccgttgcaacgcacgggctcttttgctagtctagaaaaacaaggacacgtcttctctcctagtactagtatttcttaattataaatatactaattaatctttccggccatgttgattagataggacttgtttagaaaagaaggactttgcctactaccgaacggagaaggcaccaacatccatttatcatggagggagtcctgaagtttggtttgacagtatccttcttcggttcaactggtgtaatcttgaagttaaatgagcggatctgtaacacatctggtagatcatatcttgaatgctgcagtatatttgcaactgaatatattgtcaagtgtgtcttttgttcagcacgtggagcagcaccaagtaaacctgctgtgttttgcaccggaaaaataagagagccattgttgggcacatcatcctctgcctcttgaatcgaagccatcctcagcttcaaagcaacctttgtgatcttttgttgtggagaaactttatcatctaccttgatgggattggcaaacatcggtctcagcacattccgttttccattataccaaaatgaataagtattggacctcccatcatgtgtggctccatgatcatattgccaaggcctccccaacaatgaatgacatacattcattggaaaaacatcacatatcaccatatcagtataatcgccaacagaaaaattcacgcggactttatgagtaaccttgaggttccctgtatgatacatccactcggcacggtatggttgagggtgcttccatgtaggtaaccccaaagcttccaccaagaagttgcctcttcatcactagcggatgtatatccatcttttgtgagcaatactctcttctcattaggacagtcacaccttcatatgtccccttcctccacacttgaaacattctatgtcactagaacggtcggtggactgcacacttgtatcagctctcgatgctcctaattttgacacatccttttgcacaaaaccattggatcgattcgacgatgccatcttggaactagtgccaacttcatcggatttttgttgaggatgtcgccatgagttagaagtggtgctatgaaaaacattagtttgacaccgcttaatttgttgctctgcacgcacagtttggtggacaagatcttgcatgttgtaataaaccaccatctctacatgatcttgcacctctatgtttagcccgttaaagaaacatgccatggtttcctccggatcctccgtcgtccctgtacgtattataagcaactccatctccttgtaatattcatcaacactcatattaccttgagagagccactgcatcttgttgtacatatctcttctatagtacgctcaggaacaaatcgccgcctcatgaattctttcatccctcgccaagccatcggacaatgtcatcaccggaaaatttgattccaccaaattaagcgtaatcagtgaaatcaattcaagcaagttgaactttcttctctttgctataatgatgggcataaaaaatttgatcaatgcgcatctcccactccaaatagacttctggttcgcacttgccggagaacgaaggaattgaaatttttatgtgtccaattccatcatccaaaggaacacgcgcagcttgaccaactcggtcatgcgctccgcctcgagcggcagcttcaggacagggctgaaagtgtcgcgtaccccgcctcatgatcaacatcgtcatcaaggtcatcatctctagcatgtggttgtgccgccaaacggagatcatgcacgacggcatgtccgtcgcgagccgctggtgcacaacgcatgggagcaactggagcagcctgtggtggtgcagaattagtcgtcgacgtattgatggtgtccgtcaaagcgtcgaaatgggcaatcagaacatcaatctttttgccaagcttcacctcgagcgtgtcatggcattgcttgacgtagttgcatgtgtggtcaaaatcatcacggatattttgaggaatatcatctgcatacactggacatacaatttcctctaaatcagcagcaacctcgccatctctattgaccgaggttgacaacttgatcaacacagcaccgtgaacaaccttagctctaaatgtcacttgataagactcgactagaagacgagtcgttggttagtccgatcttccatggtacttgtgaaaaaacaatgaacgacggtagcaatagtcgcagaagaaatagaagtagaagaaaagaaacctttggatcaaacgaacaaggtaagaagcaaatgagaagacttgcaccgaaactgatatgtgatcagacacaagcacagcagcaacgaatccctaggattcgcaagaacatatccttggtgcctcctgacgtgaggccttttctgttgtttttattcaacttgaaactaaaacaaatctgcccccgatacaaaagtgaatatgcctaatatataggctgacacaaaccagccgcaaacggcgtaccaaactctctaaccgactcgatcgcgtatactagctaaaaaacacaaggacacgttttctctcctagtactagtattttttaattataaatacactaattaatctttccggccatgttgattacgtaggacttgtttagaaaagaaggactttgcctaccgccgaacggagaaggcaccaacatccatttatcttggagtagccctcaagtttggtttgacagtatccttcttcggttcaactggtgtaatctcgaagttaaacgagccgatctgtaacacattggtaggtcatatcttgaatcctccagtatatttgcaactgaatatattgtcaagtgtgtcttttgttcagcacgtggagcagcgccaagtaaacctgctgagttttgcactggaaaaataagagagccattgttgggcacatcattaattttccatggtccccataaagtaaggctgccatggtccatatactaaattttccatggcccatatactaaatttgcaatgtgtatcaaattatttttgttagagaaggtgtaaaaacaatgtgaaatttccatgtgagaaactacaaaacatttcacataatggcaaaaaaataagaatgttgtttgcttggaaaaaagttgggaaatttaggaacttgccgcatgaaaaaatacaagaattttgttctcgaaaacatacggcaaatttatggatttgccaaaagggtgcgaaaagaaaattttgccacttgttcactaattgtcatgctatgcacaatacaaaatgccatggtagagactatagagaatttgtcatggtatctgaaataataacgacattgtaaaatacaatttttattgccatggccgaaatcaatagaaatgcctgtatttgccatgtgaacatggaaatcatacgacttgccacgcgacaaaaaaaatgccatgtgacaagtttcaaaattcaaaggtttgccatgtatgcattccaatgatttgtacaattttccatgttttggaaaagtaaagtattatgaatttgcaatgtgccagataagaatttaccatgttatgaacctgcacatagaaaatgcaaagattcccattctggagcgaacatttttaccagccaacggccatctaggtgttcgccccagatttttaacatttgggtatatcattgcgtaagagtagattcagagagtaaacatatgtgacaagcgtgctgtaattattcgggacaacgcagctacatatattaagttccagtttgcgcctctgcatgaatatagttctaatttgcacgagggcagacgacagtggttcacgaaacgcacactcgatcaagactagctaattataacaaagactagcacaccacacttgttgaagcatcgatcatccggaatttaactaatcaaaatgtttagggctaaaatctcggccgccggccggactagagtcacttggcgacggcgggcttgctgctgctgcaagccaatgcttatctgtccacggtgaccgagacgttgccggctccagcggggttgctggtgggcagctcgacgctcttctcctccttgggggttctcttgtagtagcagccgtagaggatgagctgcatgaggccgaagaaagcgccgaggccattggggatctgcatgcatgcatggcagttagatcgatgagacagaaaaatctagctagctgggtttaatcggtatacttgtttgagatgtgtatatgtatgtatgtatgtactgaccgtgacgtagaggtcgaacttgatgagcgcgtaggccaaccagcagcagccgttgaggaagttaaccagcgacagggtgaatggcatgtactccacactcttggtcttgatcaccttaccctgcaatcaagtattgcaatctaatcttagtagtacttacatcaccaggtaacaagagcacacgtacgtacgtaggtaattaacaaggctgactctcattgaatccctgatctaaatataatgagtaggtacacaaactcactggttaattagcatcataactcatagatttggcaagagtgaaggatcacaagaagcaaaagagaacatgcatcctcggtgcattggcacatacgtttgtgatgaagtgctggatcacatgtttttagtcatgtcatgaacggctcttccatgcgattgcggacccgtcactccaacagctaacacgagattttggcggccgggtgcaacagaaagtttggttggctggctatagctatttacacggcatgcaagtccagatccacaaggaaaggacacgcaggggttgcgttacctttgagcttttttgaccaaacatgtgcacacaaaacaacatcttgtgaaataacttggatgtctgaagtagatctacgtaaatcgaacagcatgcatcttctaaaataacttgggtgtgtgaagccagacccctacgtgaatctagccacaaaatacagaatatgtacacaaggcaacatcttgtctcgtaaaataatttgtgtgtggagagtacatctactgtgtgaggtgggcagcatgcattcatctagccactcaaagacacttgggcccaagagctagcagatccatgcatgcagattaaccacgcatgtcttctaaacaatgcatattatcactccatacgaccagaacggcatgcattaacacacaactaacaaagttcaaaacaaatgaaacgaaataaaataacagctgcgcctccagaattaagagcaaacggatcaatggcttaaagcatggatcaaagagtgcatgcatgcacacgtacgatcgatccatgaggaaggagggtgtaggtacgtaccatgatggtgagcggggaggcatacatgatggttccgaagatgacgcagaggatgccgacgatcatggagcgcttctcgtgggtgtgggcaccgaggagcacgccgagcacgacggccaccatgaacgccgcctcggcggcgagcacgcctatcatcttcagctgcaagcacggaggcacgcacgcacgggcatgggttagggccagatcttgttctatctagacgaaaaccaacgggcgaggggattagatttagggatgtggtagtacgtacccgcttgttgttggtggagtagaggaagaagatgatgaggtaggagccctcgatgacgagcccgatcccgttgatggtgacgacgaggatgctgttggggtggacgatggggaggccgtagaagacccagagcatgcagttgagcagcgtcgccaggtaggggtccggcttgaactcctccacgtccttggccttgatgatccgccagaaaaccggcctgcaacatccaccatccatgaatatagattactctagactgtctacaaaagaggcggcggattagaggaggggggatgggggcttacgtaggggagaggaagaggccgaaggagatgacattcccgatgataccgacgacgttgcgagctgcgtcggcggacaccatctcgctcgggtcgccggggcggaggagctgacgcgcttgaggaaggaggaagggttggttgtgggttgggggcgaatgggcgatcggggcagagggaggcggagcgtatataggcgcggcggcttcgccttcccaagttatcgttggaactgatctcagtcaaaacaaattaactaaaccgagagaaaagggcgggagggataagccttgatctctctctctctctctctctctctctctctaagttgccctgatctcaagggcgccctatgtctggcattgtaagcgagacaggagcgaaccccatgctgaacggaaccccggttgggccggctcacgcgcactggaaagaccagcctggtttctgttttgtttctttcacgtttttattttatttttttctttcttttttttgagagagaaatttccaatctattcatcaatcatgacagtacagagaacacaagaggtaataaaaattacaaccaggtctatggaccacctagcgacgactacaagcactggagcgagccgatggcgcgccaccgtcatcgcccctccatcatcggagccgggcaaaccttgttgtagtagacagttgggaagtcgttgtgctaaggtcccaaaggacgagcacaccagagcagcaaccatcgccgatgaagggagttgtagatcggaaaaatcaagcctgaaaccacacgaacgaagacgaacaaaaactggatccaaataaatccatcgaagaccaacaccggccaaatcccaggagatccgacggagacacacctccacacatcctttaacaacgctattcgcaccatcgggacggggatgggatgtgggagacattattgctaccaagagacatcgccgccgccacacagccccaaccaagacgttcagtctagcaaaaatgagaacagggtccctcccgccggcggggggccgagatcctccgcacctccacaggccaaatgccatcggaggcggggcggatccgcggcggtgccgacgggaggaggaagaagacttttctttgctgtgtggatacttatccttgtgagaggcctagtccatccgcaccttttatttttcttttgtttatactctaaaatattctaaatatatatattacacaaaacactcttcaaaaaatatttgaaagatcttgaacaaatattttgacaatgttgggcaagtatttgaaaaatgttgaacaagtatttcgaaaaatgttgatcatgtatataaaactgtttaacaaatatttgaaaaatactgaacaagtatttgagaaagaaaaaagtccattttactaccctgaataaagtgggtggttcactttacctcctgatcttattttcagcttcttccaccccctaaacaaaccaaaaccagacacacacaaaaaccctggccggtttgtcttcacccgcggctgatgtggcagtggtcaacggtggttttgactcggtggggccctcttgtcaggtcgggctggatagagatgcggcgcaggttcgattcgaaccaaaaaaatccccagccctctcccctctctgtcgccgttgctggccctgtcgaggcagcggtgatctaaggtgagcaaggctggtcggagtgctgttggcggctacggcagtggtgcatccgacgaatctttcccgaggtgttgcttctcccacggccgctgtcctgccgccttcctcaaaccctagttcgatgcctccgtcgacggggcggcgaccgatgttgtagggaggggtcagactggttccgcggcggcgcagacgaactgaggtgagtcccatccccttcccgctctacttgctgcagttgctatagttgttatctgctctagttgctgtagaaagtagaaaaagctcatgtctttaggttctaattgtccattgcttgctgtaggttaagcaatggatgagctagattggttaggcattcatttcttttacaatggccaatttgagaagtcaaggaagtgtgtgtcatatgttggtggtcatatacaagtcacacaaattcatagggacattgttaccatagcaactgtcagggatcagcttgcagacataatgatggcttatcatgttcaagagcttactgacaatcacaggctgtactggttgtttcctggaaaaaatgttagagatgggcggagaaggtcggacactgatgctaatgtgcatttcatggacaggtgcattacagatggtggtgttgtggatgtatatgtgaattatgaagataatggtgctgaagatggacaggacagtgggtctgaaagtggagaagagaaggaacaaaatgatgtttcaaatgcagaagaagatagggcagaagagaacactgacattgattgggaggatgagcatgaaaattgctctgttgaggaggacctggagcatgaaagtggagaagagaaggaacaaaatgatgttcctttagtggatgttgcacaagatgaaatcagtgatgaatgtgaagatctagattggtgccctagagatgaagacagtgatgggaatcgtagcataattttaaaattttcctacgctcaccaagatgcatctatggagtgtactagcaacgaggggaaaggagtgcatctacatacccttgtagatcgcgagcggaagcgtttcaatgaacgtggatgacggagtcgtactcgccgtgatccaaatcaccgatgaccgagtgccgaacggacggcacctccgcgttcaacacacgtacggtgcagcaacgtctcctccttcttgatccagcaagggggaaggagaggttgatggagatccagcaacacgacggcgtggtggtggatgtagcgggtctccggcagggcttcgccgagcttctgcgagagagagagagagaggtgttgcaggggaggagggaggagcccaaagctgtaggttgctgccctccctccccccctttatataggccccctgggggggcgccggcccagggagatgggatctccaagggggggcggcggccaaagggggggaaggggtgccttgccccccaaggcaaaggggaaactccccctagggttcccaaccctaggcgcatggggggaggcccaaggggggcgccccagcccactaagggctggtgcccttccactttcagcccacggggctctccgggatgggtggccccacccggtggacctccgggacccttccggtggtcccggtacaataccggtaacccccgaaactttcccggtggccgaaactggacttcctatatataattcttcacctccggaccattccgcaacctctcgcgacgtccgggatctcatccgggactccgaacaactttcgggtttccgcatacatatatctctacaaccctagcgtcaccggaccttaagtgtgtagaccctacgggttcgggagacatgcagacatgaccgagacgcctctccggtcaataaccaacagcgggatctggatacccatgttggctcccacnacggatggcacctccgcgttcaacacacgtacggtgcagcgacgtctcctccttcttgatccagcaagggggaaggagaggttgatggagatccagcagcacgacggcgtggtggtggatgtagcgggatgccggcagggcttcgccgagcatatacgagagagagagagaggtgttgcagggggacagggaggcgcccaaggctgtgatattgctgccctcccttccccccccctttatataggcccccttgggaggggggcgccggccaaacccatctagggtgggggggcggcggccagggggtgccttgccccccaaggcaagtgggaacccccccccaccctagggttcccaaccctaggcgcatggggggaggcccatgggggggcgcccagcccactaggggctggttcccttcccacttcagcccacggggccctccgggataggtggccccacccggtggtcccggtacaataccggtaacccccgaaactttcccggtggccgaaacttgacttcctatatatnnnnnnnnnnnnnnnnnnnnnnnnnnnnnnnnnnnnnnnnnnnnnnnnnnnnnnnnnnnnnnnnnnnnnnnnnnnnnnnnnnnnnnnnnnnnnnnnnnnnnnnnnnnnnnnnnnnnnnnnnnnnnnnnnnnnnnnnnnnnnnnnnnnnnnnnnnnnnnnnnnnnnnnnnnnnnnnnnnnnnnnnnnnnnnnnnnnnnnnnnnnnnnnnnnnnnnnnnnnnnnnnnnnnnnnnnnnnnnnnnnnnnnnnnnnnnnnnnnnnnnnnnnnnnnnnnnnngtcaatcggtatgttacttgcccgagattcgatcgtcggtatcccaataccttgttcaatctcgttaccggcaagtctctttactcgtaccgcaatgcatgatcccgtgactaacgccttagtcacatattatgatgatgcattaccgagtgggcccagagatacctctccgtcacacggagtgacaaatcccagtctcgatccgtgccaacccaacagacactttcggagatacccgtagtgcacctttatagtcacccagttacgttatgacgtttgcatacccaaagcactcctacggtatccgggagttgcacgatctcatggtctaaggaaaagatacttgacattggaaaagctctagcaaacgaaactacacgatcttttatgctatgcttaggattgggtcttgtccatcacatcattctcctaatgatgtgatcccgttatcaatgacatccaatgtccatagtcaggntcaggaaaccatgactatctgttgatcaacgagctagtcaactagaggcttactagggacacgttgtggtctatgtattcacacatgtattacgatttccggacaatacaattataccatgaacaatagacaattaccatgaacaaagaaatataataataaccatttattattgcctctagggcatatttccaataagatgttcgtttaattcttatagttcatttcattcaaaatcatctagtttttataagaaagctaatctattttaagattcatggaattgtgcgttgtaaggcataaagtaaaaacaaatcatgtagaaaaacatttgggcaattctgatacggaagattctagaacaaaaagaagtgcttgtgttttgaggtttgtgcattatgcttaaattcaaccatagagtcttctagattgtacatgtggcaaaatctggtggaatctagatgatatccaacggccaatagtgctcaaatttgccagctctgcaccatcggattggcctcatccaacgaccatctttcaaagttaaagttatctgcacactatataaaaaatataaaatatatatataggggtatagatatagatatgtgatgcgaaagccaccacatcatctccaattagaatagtgtgtccatgcacagatgcaatgtggccaaacgatgtctgccatcggtatctcaaattcaaaccaatctgaccttgttcaatgtgtatacattgcaacatgctcgtttccaaaccacaccgcgtagatctccgttatattcatgcatgcatgggtttcaaacatcatgatctcttattcaaatatttgaattcaactttacattgattatgacctcacctagtattttacacccacacattgnattttacacccacacattggtcttctctttataattgtaccactaactttctctcgtgcatgcatgcacacacactaccagtcggcattatccatcgcacacatgcaatatttttcttcaggtcggtcgcccatgaaggcgcgcacacacacacacatccccctctccatcatatcgggcattctttatctctcacgtacatgtgcaacgatcgatgttcctctatgtgtgtgtgtatatagctaggtatttcaaagttttccacataaaccgatcaatctatatatctagtgaggtctcaccctctttcccacgtccacatcgatcaatctatacctctctatataggattacatatatagctaatacacccacattaattatatatccaatgcccccctctcatcatccatgccttccgcttcatctctcagacgcacgcacaatggcgaagacagggggcagcaagggccctgccccccctaacatcactatatatcgaggctaatatgaatgtgatcattagacaattgctggtaaaaatggtttaagttgatgaattggccctcctcgtaaaggattagcaatgcttggccccctagctcatggaacatttttcatggctccgccactgcgcgcaacagcgcatgttctcgccccctctctctaaatatcgatctcgcagttgtgcactccttcatagtctccctccactcggcccctcgcaccatcttctagccccccaccggattttgccacatgtacaatctagcagactccatggtgtaacttaagcataatgcacaaatctcaaaacaacagtggttctcctttgttctagaatcttccgtatcataactgcccaaactttttttctagttgaattgccattatttgtttttagtttatgctttacaacgcacaattccatgactcataaaatatattaagggcttctttgattcaaaggattctcgaaggaattttggaggattctaatccttaggatttttcctatcttggttgtttgattcgtaggattgtaaaccataggaatttttccatatggttcatttgcactagatttcataggaaacatcccatccactcaaacctctttgaaagaattttgcgttttttctatgcacaatcaaacactcgtaccatcatgtaggattcaagacaacattccactctaatcccatgttcttcctattcccgcgttttggaaatccttcgaatcaaagaggccctaggttttctataaaaactaattgattttgaatgagatgaactataagaattaaacaaaggtctacatcatgcatatatgactcagagcttacatgctacagtgtggtatttattcgtaatttggttgcaaaatctgacgcgtgcaatgcacgtgtaccttactagtacttagagtatgtgcaaaacacaatggcacgctacacagtgtctctcttacagttcatgaagccacgtggcacatgtggaggcgttgtcgcgacatccttgtgtggattgatcacagtgacgtgctactagttctagaagaatgtactcgtcctccctgagccgcactggcagtacatgcatgaagcgaagatgtgcacgcatgcaacgcacgcactcattccctcgcacgcacatgcgggtacacgggcggacacaattttgtaccaagatccaccccatgtgataatttgacgcgtgtaaagtccttcacttcattgatggtcaattaatacagtgcatgcaaattgagtagacgtgagggcggaagaaagacattactactccactgcgcgcatgcgagtagttaaatcatgggttgctagtagtacttccattggtctcctttgtattttgtgtcaatttttgacagtaacataatatttatgcatctgagcagtgtagtctacttgaaatttatgttccactaaactcatcgggagtcgtttcgggcctcgaaacaaaaaaccatcaattcatctttaacgtgttcccatcacattcaaaagtactagtgctacaattaagtgcaagcctgctcacacccaccaatacgtaccaaacctgaacgtgttcccactatgcaggttttagtactagtgctagtacttaggttataaaaaggggaactacctaaccgaaaattactctaccttcctcctcataagtcctccttcttcgtccgtccttgccatggccggtgtgcagagctctaggtcgagaactactcgtaacaagggagcggcaacca

SEQ ID NO: 18 - DNA, 19991 bp, Triticum aestivum
  modified_base (1163)..(1181): a, c, t or g
tgtttctatggaatggcgacggcaccaatgggggagggcgacggcagcgggagcgaggaggagggggaagaagaatgggggagggcgacggcagcgggagctaggaggagggggaagaagaatgggggagggcgacggcgacgggagcgaggagggggaaaagagacgaatgcgggagtggatgactaaagacgagcccgaacggcgccgtctaacggctgccgggacggcctggagtgccacgtacgcgaaaaacgggccccacctgtcataaactcacttaactcagcccgatccgccgatcagtggtttttgcaaaacaattacgcaagacgtggtgctttctgcagagaatctgtatcctagtgtttttcgcaaaccgagccctcaaagtggtggttttatgcaatttactccctgccacaagacaataatcctttctcccctctttctcaatgatttccaacccgcaccccaccaactcacacgggatactaccatctcactgacacagggcctcgatgggcagcaaaggagaattagtggagtccgtaattcttcctccacacaaatacgtactctacctgtagtgttaaaagctgtgggacatatacgtcagtctaactttgactgtcaggtaaggtgcttggaaggtgataaagggtagttttggggtccaacggcccgccactacgctcggcccactgcccagagagagaaacgtgttctcggggaggcggggagagagggagctagcatttccaccgccttcaccctccgatcgcgccagcgtgtcccccctcgccctagggaaggcaggctgggccgtcggatccgggtataagtagcgacgcgcacgcgggccgtgcctattcctgtacttgccgccccgaccacctcccccgtttggttccaccattccattccagcgcaggacggcgggacgcgcgaggcggaggcggaaggaagcggagcgcgctcgcgctagggttcgtccgctccctctccccctctctgttccggccgaatcgaccgaccctagctggctagcgctgacccgctgcgccgaatgcaggcggaagcccccgagatcgcgaggtggtggaggcggagatgacggcgccgcgcggtggcggggatgtgccatcgtcgacggcgtcggnnnnnnnnnnnnnnnnnnngagcccaacacgccgacgtcggcgcacgcgtcggggctcaaccggcgggggtcgaggggcgccgccatggcctccttctccatggaggtcttcgacaacgaggtggtgccgtcctcgctcagcagcatcgcccccatcctgcgcgtcgccgccgagatcgagcacgagcgcccccgcgtcgcctacctctgtaagttcgttgcacttcgaagccgtctccgcgcccgcgcgtgcctgttttgggagattttcgacgccttttcctggcacagctcggcgcatttggtgtctcggtcggacgaaacgggcaactcgtgatgatatgtttggcgattcacagccgttgtagtgtttatttgggaaggttttgtgctcacgaatctcggaaaatacatgccgcgtgcgtcggttgttgttgtttttgtttctgggctgctttgattgttacgagtttattaaggggcatgtctgagatttctccgcgtatgttggttttgctgcgttagctggatcttcggctttgatatgtttctccttactcgtgaagctgatcttagaagtagctagcttctctcctgtatgctgcaccatgaggtgttcgtattcctatatgatcgtatcgacgagatggcttgtgtttgagagcgcagattagatttagttgatgcaacttccagattccaacgttctccctcgattgtgttgcttttgcttgaatttggtatctatttaatacttgctggttatgtttgaatcattaatttaggctaggatagtgctgcgcgatcagtttgcttggaaagttggaataccatatatcaggtagctcgtgtaggttcttcggtgtctctatgtgagatttctccgcctatgtcgatctagctgtacatgctgcgctagattttggatttagtgtgttttctccttttttcagtagctaattttgtcgcaggttagcttctgtatgcttgcattattcgtaccaaaccaaatcactactgtttttcgaagtgcagagccgcagatttgattcattttatggcttttccgacagttctccctagctcgttttgattgaatatgggcgctctctgtgttgtttgaatcatgtcagatatgacagttttgctccaccagcttttctctgaagaagtgcatatcacgtagcatgaatgggtgcttctggttcgcccttttttcgggatctcacgttgatctgttactctgtgaactaggtcggttctatgccttcgagaaggcgcacaggctggatcaaaactctgttggtcgtggcgtccggcagttcaaaacgtccctgcttcagcgcttagagaaggtgtgagacatctttctgtctcttcccctccataatttctgcatgatctagctgacttggcgtacatgagggtttgttttgttagttgatacatgtcgacttgatcatgttccctcgctggttttgactgggtcactgtatctggccttcatagatatattatgcaagttgttgaattattattactaccatcttagctttttaactgcttgcaggatatatataggtaatatagagtatgagtttgtttggctaataagcctcatggagttaaaaataagctggaagctaatatggacgactctaccttaatttagttgtcaaaatgtagtagtggtgcaagttatgttgtccaaatgctcagataaaccaaagggaaataggcaacatatgcacatgcagtttaagccatgaaagtatttcctacttttcatttttgtgttgtaatatatatcttgcagatacacgatttttaacttcaagagtatggtcgctggactttagttcagtacacatttgtttcatgataagcttaccaactccatctccaaatacatgacgtagaaagcatgtagtcaaacttctctacgtttgaccattaatcaaatcaaattatttagtttttttggatagaaattataccattgattcagaacagtttcactatatatctttttacttatatatgttgttcattgaagactcaaaatgcaaaacattatctatcttagaacggtgggagtatatttgattattagtgataagttgataactgtcgataatcaatctggaaattttattgtgattatcctatttgatgaccatattgggagttgtgatcagccaagcaaacctgcaagctcacttaatcctacctaacagataaagaacactgttctagtaatagaatggtgtgcttcgttttattgtgattatcttaatttttaaccatattgggagttgtgatcagccaagcaaacctacaagctcacttgatcctgcctgatagataaagaacattgttccagtaatagaatgttgtgcttcgttctacttattttgtttcaaagtcacaactaaaccttcagttcagattcaacatttatttcgtgtttctgctggggagggggatgaggtaaaatgacttcagattacaccatcctcctcatgattcgtctcaattgatcagtttgcaatggcagattcttgtttgttagagatataatgaggtagccacattctcatctgagcttattttttcagatgatccagttcaaatttaccacttttttgtttcctacttgaaatggccagcgaatgtagtagaatggggaaaaggagcagggacttagggttcccttgttttcttaaatcggattttgcctaacctactcttgaatccaaagatcctgccttaaaatttcccatttcgatcccacgcaatccaacaggataatagcccgagtctcgcaaagcgattgaagaaaactgatgcccgcgaaattgagagtttctatcaagaatactatgagaactatgtccgcaccctcgacaaaggggaacaagccgacaggtaattcccaatccctaacctatactgcgatctcccctataagtccaatccctcgctatcacgaatccggtcccatgacattgtcgcctccaggactcaacttgggaaggcctaccaaacggctggagtcctcttcgaggtgctctgtgccgtcaacaagaatgagaaggttgagcaagttaaccccgaggtttgtgctcactccagccaactgtcgtcgttctttctcagtagaaatctaggttccctctaatgcatcaagtttttccaaatttcctctgcacagattatgcgctggcacactgaggtgcaagaaaagaaagacatctacgcgccgttcaatattctgcctctcgatgcggccagtgcatcccagtccatcatgcagctggaggaggtatacgacttacaacaatgcagcctatttcctcaaaacaggaacaattgcattatgtactggttcaattaaagaaactgacgtggtcatcgaatgcatcattaacagataaaagcagcagtcgcagctctgcggtacacacggggtttgacctggccttctgcatttgagccggaaaggcagaaggggggtgagctcgatttgctcgattggttgagagctatgtttggctttcaggtctgctacccactccaggcaaaccaatttcgattggtccattgtattactataagctaacactagcttatcttcttgtgtgcagcgggacagtgtcaggaatcaacgggagcatttgattcttctcctcgctaatgtgcacattagacttgagccaaagcctgaaccacttagcaaggcacactcttctatcaatatttactttgacagcttgactttatgaatatcaattgataagcataagatcaatgggttttgcatgcataaaaatgtggtggtagcttctgacagaacaggatatttgcctgagtttctaatattttaaaaaaataaagttatttttcattggattagtaaccaattatttaccttcaacgttatgttgtgattgttggtgtaacttgccataacatacacatgcagtttaatttctttcttgatactactattttttatttccatattcttgacattagaatttgctggactggtgccactacttgcaaaaatgccagctgacttattggctttccaccacgaattcgattgattgaactttctgtatgcattattctgaagcaagtgcgtagctaaataatgttaattacaccctccatttcccatgctttgcttctctcctttttgttcatcgttgcttgatgattgatctcatccgttctttcacccctgaaacagctagatgaccgagctgttgatgtagtgatgaacaagttgttcaacaactacaagaagtggtgcaaatttttgtcacggaaacatagtttgaggtatataattccttaatcagtttcctctttatgtacattattgtgctgataatcttgcaactgcagaaatcctccaggtgctcaattacaggaagttcagcaacgcagaattttgtacctaggtctttatcttcttatctggggcgaatcagcaaatatccggtttatgccagagtgtctttgctacatttttcacaatgtaatttgcacattcttattatcatatcaagtaccaaatctcattgcaaaaatatatctttgaatgattcttctcaatgtgttcagatggcatatgagttgcatgggttgcttgctggaaatgttagtattgtgactggtgaaaatatcaggccatcttatggtggggatgaggaggctttcttaaagaaagtggtcacacctatctatcgtgtcatcagaaaggtactttgataaattaccattacctgaaattccaagttagtttgttctaaatataattgtggtggtttttcaggaggcaggaaaaagccaacatggaaaaactgcacattcagcatggtgtaattatgatgatctaaatgagtacttctggtctgtttacagccctattttctggtcacatgctgacagccttttcacactttctctgatagatcctactctgtttcaggacacctgattgtttctcactgggatggccaatgcgagatgatggtgacttcttcaaatccgtgcacgattcaaggcctgtagcagtggtacagttcgatataagtctgtcagtatctcttccaaagactttgattaggaggagaatactgacaaataactatttgtaggctggaagctcctcaccaaagggttctagtaaaggcacaggcaagacaaattttgtagagacaagatcgttttggcacatctttcgtagttttgaccgaatgtggaccttctatttgttggctctacaggtactgtgccaaaattttcgattggcttttttctctgtactatggtttttgatggtttgacactctgtgaatcttataatttttaaaccgaacaggcaatgttgatttttgcttggagtgaatattcagtgactcaaatccttcagaaggacctcttatattctctatcaagcatatttgtcacagcagcatttttacagttcctccaaagtatgtttcccatttcaaatacttgttttatgtacaaggcatttttctgatgcatgtaatatttccttttattttttgagaacctgaaatttttagtatgacaagtgatgaatattggcataatttagttccctttatgtatgtaataccttctgcttttgtcaatggcattacggtaagactatgttaagctaggttcccgcgatacagagcactttcacagcagaaagcaactggcaagaacattcatgtagatatctgcaactttaggatctcttctcatatgcattaaactagtgttactataccgagcagtcatgttcttgagatgctctctggtctggaattcttgtggttttaagagggttctggtgcaataacaaattcgtcatccaactgaaactgatattttctttaattttgatggcaggtattttagactttattctgaactttcctggccacattagatgcaagttcattgacgtcgtgagaaatattctgaagatagtagttagtgccgcgtgggctgtgattcttcccattttctatatcagaagtcaaacaaaagtcaatttaccactgaaaaatctggacagatggtttggttatgtgaaaggagtgccacaactatatatcctggctgtggcggtgtacctgatacctaatatgattagtgcaacgctcttcctgtttccgatgtttcgaaggtggatagagagctcggattggcatattgttagactgctactgtggtggtctcaggtattgaattcaatctattttatttgtttatgttctattatgtggaaaattacttatgcagcttatcctcattgtaaatattcatttcaaaatttctgctatgaggcaatttttaataaggtaatatttgataaaatggaactgtattttgtagaatgaatttgtcttgatatccttgccagcttattgtttgtcatagtatcctagagggttgagaaactactgataaaattgtaaactgtaacttgcaaaaagagaaaataatccaatgacttctgatgccagggcagagattatcctgctattttgtcattagtttgaaaaaaacattttatggttagttaaaaagttctcacatgcttgtgaaaattgatagttttcacttctctaacaatatgtgttcaactgaacacatttgctatcccagtaatgaaaatgatattgcaagggtacatatgcacgaaacagggtggaaaacgtgaaggcaatagattattttgtatgcaatgcgtggaagtaaaataactggatgaatttccctggatcataaggcgctgtacatttattcgtttttcatatttctttcttgtgcggcttgctacactacactacactaatggcaatgcccattttccttgttcttgctgtacacgctaattgtataaataactgcagaaacgaatttatgttggccgtggaatgcatgaaagtcaagctgctcttctgaagtaagttactctgttctatttttcttctgttagagctttattctgcagaaaacactcaattctcttctattcaactgagaaggtacacattattttggattttgctgctatgcgcgaagctttccttcagttactttgtccaggtaagttctatgcttagttatttgcaaacatgctttgacgagattaatctgaaacagtttaatttgcagatacaacctcttataaggcctaccaaggatataatgagtgttcataacattcgttatgagtggcatgagttttttccaaacggtaattccaatgctttttttttttgtgccgccttcattctggaaccctttttttactgatacttcgttgccttttcagcatcatataatatcgctgctatcctatccctctgggcccctgttctgttggtatgcacttatccagcctgctagtgtagtgcctatccagcttatgtattagctgaaaagtagcttcatttattcccgtttgtttcaaaactgcattctaaatcttggtttatcaactacaatgcttttattcttgtaggtctatttgatggatacacagatatggtatgccattttctctacaatatccggcggtatgtctggggcacttggacgacttggggaggtaatgataaatctgaactattctctgtaatctgttgttttgctttataatttagaacttataatgaccataagtgtagggcaccccaagattgatggatagctaaggggctttttctttatattgaggagtaaactgaacgtgtcgaggtctcagtcaattgcatgaaacaaatagctcgtactttataaacataacggcgggctatgtagatggtaatacagttttatgcagaatattttgtttgaggaagcttagcgaggtattttaataagtgaaaatcaccttttttgtttttgcagcctgagaattcagaataaactacattagattataatggtaattttaagtagataaatatggaagtgtattcacaaggcaaatgggatattcatttttaggaggatcctctgggagtcgcacttcagtcttgtttctgttatgctgccgtatttacaagaaaacctttttcatattcatgaaatgaagcaaaaaatgtattgctggtggcttggtgtatttatagtcggatattctcctttttaaccgtcgacatttttgtattagcactgccttttttactttgttattgccgtacagcgttgtgtaactttttctttttgcaagagttaagaagctgaacttcatactgttctggtttctgatggagttactacactcttgtaccagattcgaacactaggaatgctgagatcacgatttcactctttgcctggagccttcaatacatatttggtgccatcagacaaaggcagaaacagacgtttttcactctcaaagcgcttcgcagaggtaccaaatgacaataacgaaaattattgtcaagatttctcttataaccccccttaaaagttatgatataatgaagaatttaaagtacaggtttcccccaacaagagaactgaagctgccaagtttgctcaactgtggaatgaagtgatttgcagtttccgcgacgaagattttataagtgataagtgaggcccttagatcatgttcacctagaaaacattatcattgcaatgtagataatggaccttctgttatgcagggagatggacctattggtggttccatactcatcagacccgagcctaaaattgatgcagtggccgttgttcttgcttgctagcaaggtttggcagaacaaatttaatatgtccactctaccttgttacatgtttgtgttcggctcttactggaaatcattttgattgaaatttgcagatacctatagctttagacatggcagcacaatttagaccgagagacagtgatttgtggaagcgtatatgtgctgacgagtatatgaagtgcgctgtaattgaatgctacgagtcattcaaacttgttcttaatttagtggtggttggagaaaatgaaaagaggtatcttcttatacttccattttccactgtttcacgtatctctatgtgagaaagacattgatgttgtttgtcatagcttttaggtattcagttaatgataacactaggaaatactccctccgtcccaaaattcttgtcttagatttgtctagatacggatgtatctaacactaaaatgtaactagatacatccgtatttagacaaatctaagacacgaattttgggatggagggagtatatacttacatccggaatagacattgtgcactatttttcttcaaaaaaatcgttactagtactccctccgttcggaattacttgtcgcggaaatggatgtatttagacgtattttagttctagatacatccatttccgagacaagtaattccgaacggagggagtacctagtaggtttctatgattgtctaaggctcctctgttgacgaatccttgccacttttgagcaagacagggccacccaggaaatcatttgtttcgttccaatatgataaaatcattcttaccataaactgggaaacacgcaggtcagcacaagtatttttgaacatataaagtggtcagacatggctgaatatttgtagtttgaacatgcacgttttcattcgtagtagttgatgcaaaagatcaatacaaatatattactaaaaatctacaaccctatatgataatggggtttgagagttcaagattacaaatacattacttttaccaataaatatatatctggctagttgcgtatggcggcacatcatcactttcaaacttaagaatcaagatattccaaattgaactagggaggaggactgccaagcacctccattgtgcaatatgcatggaagggaaaccatgattagttgtaactgctaaatgtgcaacatgtgttagataggcagccttagtactattgaaggcatctgtgtccatctttcatgttttttttactgcattgttctttatcattgcatgctcactgttatcttgatcttctactgacatgtttgttcactaacttcaacaggattattgggattataatcaaagagattgaagctaacatcgcaaagaatacattccttgccaattttaggatgagcgcattgccagtcctttgcaagaagtttgtggagcttgtatccaccttggtaagcaatgttgttacctctactgaacaccaaccctattgaagattgcattgcttgatatttttttagacaagtaacacgttcgattattgctacgattatgtgatcacatctgcagaaagaaagagacgcctcaaaatttgataatgtagtgctattgcttcaagacatgctggaagtgatcacgagggatatgatggtcaatgagatcaagtaataccttttgcacaaattataatcatacatgtgccttgtcatagaaactggtgactattttttttaacatgtgttgtttacagagaactagctgaatttggtcatgggaacaaggatttagttccaagaagacaactttttgcgggcacaggcacaaaacctgcaattgttttcccaccaccaatttctgcgcagtgggaagaacaagtaataacatcacattcttatttggcttttgtaacaaagaaggttcactaacttcacctatctacagattaagcgcttgtaccttcttttgactgttaaagaatcagcaatggatgtgcctacaaatcttgaagcccgccggagaatatcatttttcactaattcgctattcatggagatgccacgtgcgcctagagtgcgcaaaatgctctctttcaggtttgtctcgtatgtaaactttcaacatatcacagtgttgtccagtccacttttctaaatacaccgcagtatcgaaaatcataatgtctagctaaattagctggattcattggagcctggcagctactggctaatggtccttttactgtgcttcttaaaaagaattatatctgcttgtcaagatatattttgggctgaattatggtatgttcttaactctgatcagtttgaaagaacagaaaacatgaatatttttgggcgtggaattgtgaatttgtgctagtcaggaaagaggaaagcaccattaagaccaaggagaagcttatcaatgttgggattttaactgatttttttgctgtttgatgaactcgtattctgaactaaatggcggggtggtttctaattttcacggtcagttgtttaggatttttttattacaggttattttgatcactgccatcctcatcgtagtcttaaaaaacttcttgctgtcatttgatgtgttgtttaagctaaaaatggaagtatgagtgtcctgatgccattatgtggtattgagttgcttttgaaactgtctttgagtctgccactctcattgtctcagcagatttgcatgccccttctcggtattaactacagagtcggagttttgtgtcttgaccagttaacccaatggcgccatgatcatactagaaccgaagttcatctacagttttgatcagaattcatttaaagttgcattatattacaactgattctgtactcatcagctcatgttcgcttgatggtaaacaaaatttataaacagaagtgttgaacatccacaatgtctggcagtggcactctgtaatcttgttacttgtacaagtacatatgtttccaccttaaaggaaaaatgcacctagatattctaaaaaaataacaagtggtgaacttccaggtggagacctgtacaacagaatgtgtgcgacccatctttaagtgcattcataatcacaaatcaacaacgttaacaccagaaatatattatcagttcacaacaacaaatatctgataaaccgtatggttaaatttgttctgtgatcataagagtttcagcgaaaaagattgggctctagatgattcatatgacacttgttcttcacagtgtaatgacaccatactacagtgaggaaactgtatattcaagaaacgaccttgatctggagaatgaggatggtgtatcaattatattctacctgcagaagatctttccaggttcctttcctatttgatgtgtttaatgcctacagttctttatgaatttgattgccagctttttgtcttctattcttgataatttttgttatatagatgaatgggataatttcatggaaaggattgattgcaaaaaagaaactgaagtttggggaaatgaagaaaatgttcttcaacttcgtcattgggcctctcttagagggcagacactctgtcgaacaggtacttcggccataccctttaaccttgtcaaatatggatcatttagctgattccgtgtttacatgtttttcttattgtgaatagtgagaggcatgatgtattacaggaaagctttgaagcttcaagcattcctagacatggcttctgaatctggtgagcttcttcaacttccaattcgagcattcctagacatgatgcatttagcattcctagacatgttcacaaatataagatgttttggatatttcaatatggactacatgtggactgaaatgagtgaacaaacacagtaagcttctattaataaagttagaacatcttatatttgtgaacggagagggtaccttttacaaatacttcctgattttatattgtagaactaggggagcatccgcaataggtgcaaaaagggggagtttttttcatgagaagagaactaggtctacatattatagcatctttttagaagttagacccaatcttattggacacttggaaggggtctatgcactgaggatgttctagaaggctataggggacttatacaaagtgtccaacatcaccctcttttgtttgcagagatactagaaggctataaagccattgcagatcccgcagaggaagagaagaaaagccaaagatctctgtcttctcagcttgaagctatagcagacatgaaattcacatatgttgctacgtgccagatctatggaaatcagaaacagtcgggtgatcgacatgcaacagatatactgaacttgatggtgcagtaagtgatctcgatgatctattctagaaattaatatacaacatttggccaagtgcgatacatcatgtctaccacaatgagcaaaatgttttcttgtataactctttggagactgtgtgtctcggttatgtttatatttagttcacatttaattgataatgagatgttccttgagggaaaattactgaattgcttcttttattcaaattgttatttccctctgtgcaaagtaatttcagttagaatttgaaactacagttatcctggtctccgcgtggcatacattgatgaagttgaggagagggatggtgagaaggtgcaaaaggtcttctattcggtgctagtaaaagctcttgacaatcacgatcaggtaatcattttacgtgaagcgagttcaaactttcattttggttctgatttaaaccttcaatactcagtagtgcgttatgtacttttttgtcctgtgaaggaaatataccgcataaaattgccagggccagcgaaattaggtgaagggaaacctgaaaaccaaaatcacgcgatcatttttacccgcggagaagctttgcaaaccattgatatgaaccaggtgaacttcatggttatagtacctttttggtaagtaggttgcattctgtcttttgtacttatcaatgctgtttaggacaattatttggaggaagctttgaaaatgcggaatttgctggaagaattcaatgagaaccatggtattcgtcctccaacaattcttggagtacgtgaacacatattcaccggaaggtgtgttttaagctttgcagtaggttttacttagttttctttgtcaaaattgcaaatcaatgcctaacatctgacattgctggattgtagtgtgtcatctcttgcctggtttatgtcaaaccaggaaaccagctttgtgacaataggacagagggttcttgccaatccattgaagtaagtctgaatatactttgatatgtcctatttgaattaagcgcaatccatagttatcatatttatatgctgcaatatgagtagggagtgctgagcatctatggtgactatctcctggatgagcgcttatgtttttttttatcagctcttgaaatgcacacacatgtttgttggagattttagaggcagtaaggcaataaatattaaaacaaccaagtgctatttcctggaactttcctggcataaaatcttttgaagctaaacaatgtcatcaatttaaagtgtatattgtggtctaagtgctgtatatctgacatgctgtttcctgaaactttcctggcatcaaagcttttcaagctaaacaacgtcgccaatttaaagggtgtattattgtgtatgtgctgtatatctgacatgctgtttcctgtcagtaaagcttttcgagctaaaaaatgtcgtcaatttaaaatgtgtattatatctactccctccgttcctaaatataagtctttggagagattccactatgaatcacatacggatgtatgtagatgcattttagaatgtagattcatccattttgctccgtatgtagtccatagtggaatctctacaaagacttatatttaggaacggagggagtaagtgataaatatctgacatgctgtttcctgaaactttcctggctgagcttttcaagctaaacaatgttgttaatttaaagtgtgtggtatggtcattggtcattgctatgtatctgacattctcttttctgggcagggtacgttttcactatggacatcctgatgtgtttgataggatatttcacattacaagaggtggaattagcaaggcttcctgtggtataaacttgagtgaagacatttttgctggtatgtacttttccacctattctaactgttacctgtggatttttgagggaaatttaagaatggataggtccctaggacatccacatcctcgtatatgtgactcaaactgggtttgacaactgattcacacatgggccattatatgggcctcagacagactactctaaacttgattaagacactgatgctactcttatctaacacattaactcacattccaacatttcccatttctgctcttggacaacacaaacttaaattttctttttcaggtttcaactcaactctgaggcgaggaaatgtcacccatcacgagtacattcaagtcggaaaaggacgtgatgttgggttgaatcaaatttcactctttgaggccaaagtggcgtgtggcaatggagaacaagtgcttagcagagatatctaccgtttgggccaccgctttgacttcttccgaatgctctcatgttacttcacaactgtgggattttatgtcagctcaatggtacaaaacatctacctgcatcacatttgtcttgatttgccatcgtccatgttttttgatgttcttattactgtgcagatggttgtcataatagtatatgttttcttgtatgggaggctttatttagccttaagtggacttgagtttgcaattatgaagcaagcacgaatgagaggcaaccgtgctcttgaggcagccatggggtcccaatctattgtgcagctaggtctattgatggccttacccatgtttatggagatcggactggaaaggggttttagaagcgccctgggggatttcatcatcatgcagctacagctatgtgcagtattctttaccttttccctcgggacaaaatcacattattttggccgcacaatcctccacggtggtgcaaaatatagagcaactggcagaggctttgttgttcgccatgtaaagttcgctgaaaattacagaatgtatagcaggagtcactttgtgaaaggacttgagctcatgttactacttgtagtgtatgagctctatggtgatgtggcgacagattccacggcctatgttcttctgacatcatctatgtggttcttggtaatcacatggctgtttgctccattcctcttcaacccatcaggatttgaatggcaaaaggtggtggatgattgggatgattggaacaaatggataagcagccgtggcgggattggtgtgccggccaataaggcctgggagtcgtggtgggaagaggagcaggaacatctgctgtcaacaggcataatcggccgcatatgggaaatcatattatctctccgattcttcatgtttcagtacggtatcatgtaccatctgaatatctctaatggcaacaaaagcatatcagtaagtcatcctttatttttgctagtattttacaactctactcgaactaaatggatttcatgagactgattacatgatctttttgattgtttataatcactgtttactgatacaatttagtgactgtcccttcccaacttgattttgtggcttcagatttatggtctgtcttggctggtcactgtagcagtagtgttggtcctcaaggtaaatttcatttgcttgctgttgatgaaatcaataagtatatattggttggcgtatgcctctagtttatgtccttgttatgctgctgatatgctgccatttccttaggtggtatctatgggaagaaagaaatttagtgctgacttccagcttatgttccggctcctcaaattgttcttgttcattggatctgttggaactttggcgattcttttcacccttctgcaccttacagttggtgacatattcgccagcttccttgcctttgcacccacaggatgggccattctgcaggtacgtcatcactcatcagcaccaaagctttccttttgttttgttttaaggttttactcccagcttatcacgtgcgaggactgaggagtgaggagcagtatcaattcatagggagagagaaacgagagaattttgatcgagttaaagttgctattatcgaaattgacatctttcactggctctaatccgttcggcatcattgcaacagatatcacaggcaagcaagccagtggtgaaggcttttggtctgtggggatctgtgaaggccttgtccagggggtacgagtaccttatggggatcgtgatcttcgtgccagtggcggttctggcatggttcccttttgtctcggagttccagacgaggctgctattcaaccaggcattctcccgaggcctccaaatctctcgcattttggctggcggaaagaagcaaaactgaggcgagtctaggagatgggagatgttccatcacagtaatcacacagggtagacggaggcagaaattagctcgaggttcgttgttggaggggggcatcatatggctgctaacatactgacactttcagaagtttcttagtcttgtacacacagggcagttttccttaggcattttccatgtatatctcatgctaatacactcttacctctgatactagattgtacgttgcttgtatagatagatacatgcccccacaacagttgcgacaaaacattacggtgcttttagaggcaaagatgaaactgattttttgtgcatgaagcaacaaaacagttcggtctttctagattgagagatcaaatcgatttttgtgcatgaagatgtttgtgttgtgctgtacggtgtaccagtcagttccctgctttgtgcttgtgttgtctgaaactctgaatttaggctgatgtttgaacgcgctggcatttcccagctggaacctctgctttctataaaaaacaggcctgtatggcctttctaaaaatagtctgaattgatattacgtgagatctgtttttctagaatacaagagtaccttgcactggttcggactgttgcagcatatgagcataacataagttggacggctttttgcgttatgtttcatgcgtagacaaggataatgggacagaggttgtgaattatgacggtaggtacaactttacattaggtgaaggctgacatgagttaagatggaggacctgagtctgttatccttccagctttaagcaggccacctcacgtaatctgaattcacaaatgagctgaagcaacatcgattgcaatcataggagaccgatacagctttcagcttgtccctgcccgatgtctaatgattctccaagcgcagactgccaattaagtacacacgaggtgactgaaatcccacaacgacggtcatgatatcacaggaaaatttatatttttctgctttttaaaagttttttttctgcttttttgtttcccagctattgctgcattttggttcgagccatcatttctacggtcgggctgcttttgtagggtcagcgtgttttccgcgacaaattctcattgtgcctatcccgtcccccttcgcccactaggcaagaactctcagtgtcgtgactaggttttgacgtgcagagagtacacgacgcgtgatcgtgaggccaacacccaacagtatcctaggccctaacgcatggaaaccaagtgaccgagcgagaagagaatggaggcccagaatctttggtggaaagaaacgacgtggttgtcatgtacttatgctgattacaaaattgcaaagtctggtcagaaccatcatttggtcggcattgagagttttccttctttttgaatggacaggaattgagagttgatggtgcatggtgccatttaagcgatgttcaaacgggagctgtaaatcatcccgcattcggaaattattaaaccaatggcagttcatgggcaggcaaagccctgcacgaatcttggcggctcgcatcctctattgc

SEQ ID NO: 19 - DNA, 900 bp, Artificial Sequence
  Description of Artificial Sequence: Synthetic polynucleotide
  Chimeric wheat sequence
atggtttccgctgacgcagctcgcaacgtcgtcggtatcatcgggaatgtcatctccttcggcctcttcctctcccctacgccggttttctggcggatcatcaaggccaaggacgtggaggagttcaagccggacccctacctggcgacgctgctcaactgcatgctctgggtcttctacggcctccccatcgtccaccccaacagcatcctcgtcgtcaccatcaatgggatcgggctcgtcatcgagggatcctacctcatcatcttcttcctctactccaccaacaacaagcggctgaagatgataggcgtgctcgccgccgaggcggcgttcatggtggccgtcgtgctaggcgtgctcctcggtgcccacacccacgagaagcgctccatgattgtcggcatcctctgcgtcatcttcggaaccatcatgtacgcctccccgctcctacaatatccggcggtatgtctggggcacttggacgacttggggagattcgaacactaggaatgctgagatcacgatttcactctttgcctggagccttcaatacatatttggtgccatcagacaaaggcagaaacagacgtttttcactcgcaaagcgcttcgcagaggtttcccccaacaagagaactgaagctgccaagtttgctcaactgtggaatgaagtgatttgcagtttccgcgacgaagattttataagtgataaggagatggacctattggtggttccatactcatcagacccgagcttaaaattgatgcagtggccgttgttcttgcttgctagcaagatacctatagctttagacatggcagcacaatttagaccaagagacagtgatttgtggaagcgtatatgtgcagacgagtatatgaagtgcgctgtaattg

SEQ ID NO: 20 - DNA, 2290 bp, Artificial Sequence
  Description of Artificial Sequence: Synthetic polynucleotide
caaataatgattttattttgactgatagtgacctgttcgttgcaacaaattgatgagcaatgcttttttataatgccaagtttgtacaaaaaagcaggctttaaccgcggtatacaaggaatctttaaacatacgaacagatcacttaaagttcttctgaagcaacttaaagttatcaggcatgcatggatcttggaggaatcagatgtgcagtcagggaccatagcacaagacaggcgtcttctactggtgctaccagcaaatgctggaagccgggaacactgggtacgttggaaaccacgtgatgtgaagaagtaagataaactgtaggagaaaagcatttcgtagtgggccatgaagcctttcaggacatgtattgcagtatgggccggcccattacgcaattggacgacaacaaagactagtattagtaccacctcggctatccacatagatcaaagctgatttaaaagagttgtgcagatgatccgtggcatcgggaatgtcatctccttgttttagagctagaaatagcaagttaaaataaggctagtccgttatcaacttgaaaaagtggcaccgagtcggtgcttttttttataacttaagccgcgggtatacttaattaaattggatgatctgataattaacccggggaccaagcccgttattctgacagttctggtgctcaacacatttatatttatcaaggagcacattgttactcactgctaggagggaatcgaactaggaatattgatcagaggaactacgagagagctgaagataactgccctctagctctcactgatctgggtcgcatagtgagatgcagcccacgtgagttcagcaacggtctagcgctgggcttttaggcccgcatgatcgggcttttgtcgggtggtcgacgtgttcacgattggggagagcaacgcagcagttcctcttagtttagtcccacctcgcctgtccagcagagttctgaccggtttataaactcgcttgctgcatcagacttgtacgtaccatgatggtgaggttttagagctagaaatagcaagttaaaataaggctagtccgttatcaacttgaaaaagtggcaccgagtcggtgctttttttccgcggcacgtctcgagcccgggttaattaaattggatgatgactctagataacgcagaagattaattaacccggggaccaagcccgttattctgacagttctggtgctcaacacatttatatttatcaaggagcacattgttactcactgctaggagggaatcgaactaggaatattgatcagaggaactacgagagagctgaagataactgccctctagctctcactgatctgggtcgcatagtgagatgcagcccacgtgagttcagcaacggtctagcgctgggcttttaggcccgcatgatcgggcttttgtcgggtggtcgacgtgttcacgattggggagagcaacgcagcagttcctcttagtttagtcccacctcgcctgtccagcagagttctgaccggtttataaactcgcttgctgcatcagacttgatcatcaaggccaaggacggttttagagctagaaatagcaagttaaaataaggctagtccgttatcaacttgaaaaagtggcaccgagtcggtgctttttttccgcggcacgtctcgagcccgggttaattaaattggatgatgactctagataacgcaggatccactagtaacggccgccagtgtgctggaattgcccttggatcatgaaccaacggcctggctgtatttggtggttgtgtagggagatggggagaagaaaagcccgattctcttcgctgtgatgggctggatgcatgcgggggagcgggaggcccaagtacgtgcacggtgagcggcccacagggcgagtgtgagcgcgagaggcgggaggaacagtttagtaccacattgcccagctaactcgaacgcgaccaacttataaacccgcgcgctgtcgcttgtgtgggggatgggggcttacgtagttttagagctagaaatagcaagttaaaataaggctagtccgttatcaacttgaaaaagtggcaccgagtcggtgctttttttgtcccttcgaagggcaattctgcagatatccatcacactggcggccgctcgaggtcgagggtatcgataagcttgaattcgacccagctttcttgtacaaagttggcattataaaaaataattgctcatcaatttgttgcaacgaacaggtcactatcagtcaaaataaaatcattatttg

SEQ ID NO: 21 - DNA, 2613 bp, Artificial Sequence
  Description of Artificial Sequence: Synthetic polynucleotide
caaataatgattttattttgactgatagtgacctgttcgttgcaacaaattgatgagcaatgcttttttataatgccaagtttgtacaaaaaagcaggctttaaccgcggtatacaaggaatctttaaacatacgaacagatcacttaaagttcttctgaagcaacttaaagttatcaggcatgcatggatcttggaggaatcagatgtgcagtcagggaccatagcacaagacaggcgtcttctactggtgctaccagcaaatgctggaagccgggaacactgggtacgttggaaaccacgtgatgtgaagaagtaagataaactgtaggagaaaagcatttcgtagtgggccatgaagcctttcaggacatgtattgcagtatgggccggcccattacgcaattggacgacaacaaagactagtattagtaccacctcggctatccacatagatcaaagctgatttaaaagagttgtgcagatgatccgtggcacacctgattgtttctcactgttttagagctagaaatagcaagttaaaataaggctagtccgttatcaacttgaaaaagtggcaccgagtcggtgcttttttttataacttaagccgcgggtatacttaattaaattggatgatctgactagataccggtctcgagttaacatgaatccaaaccacacggagttcaaattcccacagattaaggctcgtccgtcgcacaaggtaatgtgtgaatattatatctgtcgtgcaaaattgcctggcctgcacaattgctgttatagttggcggcagggagagttttaacattgactagcgtgctgataatttgtgagaaataataattgacaagtagatactgacatttgagaagagcttctgaactgttattagtaacaaaaatggaaagctgatgcacggaaaaaggaaagaaaaagccatacttttttttaggtaggaaaagaaaaagccatacgagactgatgtctctcagatgggccgggatctgtctatctagcaggcagcagccctaccaacctcacgggccagcaattacgagtccttctaaaacgtcccgccgagggcgcgtggccgtgctgtgcagcagcacgtctaacattagtcccacctcgccagtttacagggagcagaaccagcttataagcggaggcgcggcaccaagaagcaacttgcatctaatgtggccgttttagagctagaaatagcaagttaaaataaggctagtccgttatcaacttgaaaaagtggcaccgagtcggtgccaacattttttttgtccttctgtttttttagtcagtctcttttttcagaagtacaacatcttttttttgtccttctgtttttttagtcagtcttttttcagaagtactctatgtgatatcttcgttctgggaaatgtctgtctgtctacaacccataattatatttgcaatcacacatctaatatctctgtgacaagacagccgaacaacctaggtaagattaattaacccggggaccaagcccgttattctgacagttctggtgctcaacacatttatatttatcaaggagcacattgttactcactgctaggagggaatcgaactaggaatattgatcagaggaactacgagagagctgaagataactgccctctagctctcactgatctgggtcgcatagtgagatgcagcccacgtgagttcagcaacggtctagcgctgggcttttaggcccgcatgatcgggcttttgtcgggtggtcgacgtgttcacgattggggagagcaacgcagcagttcctcttagtttagtcccacctcgcctgtccagcagagttctgaccggtttataaactcgcttgctgcatcagacttggatggccaatgcgagatgagttttagagctagaaatagcaagttaaaataaggctagtccgttatcaacttgaaaaagtggcaccgagtcggtgctttttttccgcggcacgtctcgagcccgggttaattaaattggatgatgactctagataacgcaggatccactagtaacggccgccagtgtgctggaattgcccttggatcatgaaccaacggcctggctgtatttggtggttgtgtagggagatggggagaagaaaagcccgattctcttcgctgtgatgggctggatgcatgcgggggagcgggaggcccaagtacgtgcacggtgagcggcccacagggcgagtgtgagcgcgagaggcgggaggaacagtttagtaccacattgcccagctaactcgaacgcgaccaacttataaacccgcgcgctgtcgcttgtgtgatagtagttagtgccgcgtgttttagagctagaaatagcaagttaaaataaggctagtccgttatcaacttgaaaaagtggcaccgagtcggtgctttttttgtcccttcgaagggcaattctgcagatatccatcacactggcggccgctcgaggtcgagggtatcgataagcttgaattcgacccagctttcttgtacaaagttggcattataaaaaataattgctcatcaatttgttgcaacgaacaggtcactatcagtcaaaataaaatcattatttg

SEQ ID NO: 22 - DNA, 19 bp, Artificial Sequence
  Description of Artificial Sequence: Synthetic oligonucleotide
tcgggaatgtcatctcctt

SEQ ID NO: 23 - DNA, 19 bp, Artificial Sequence
  Description of Artificial Sequence: Synthetic oligonucleotide
tacgtaccatgatggtgag

SEQ ID NO: 24 - DNA, 19 bp, Artificial Sequence
  Description of Artificial Sequence: Synthetic oligonucleotide
atcatcaaggccaaggacg

SEQ ID NO: 25 - DNA, 19 bp, Artificial Sequence
  Description of Artificial Sequence: Synthetic oligonucleotide
ggggatgggggcttacgta

SEQ ID NO: 26 - DNA, 19 bp, Artificial Sequence
  Description of Artificial Sequence: Synthetic oligonucleotide
cacctgattgtttctcact

SEQ ID NO: 27 - DNA, 19 bp, Artificial Sequence
  Description of Artificial Sequence: Synthetic oligonucleotide
acttgcatctaatgtggcc

SEQ ID NO: 28 - DNA, 19 bp, Artificial Sequence
  Description of Artificial Sequence: Synthetic oligonucleotide
gatggccaatgcgagatga

SEQ ID NO: 29 - DNA, 19 bp, Artificial Sequence
  Description of Artificial Sequence: Synthetic oligonucleotide
atagtagttagtgccgcgt

SEQ ID NO: 30 - protein, 554 aa, Triticum aestivum
MGGGDYHQQSLIGGAAVHGHGGGTVEAALRPLVGGSHGWDYCMYWRLSPDQRFLEMAGFCCSAEFEAQVATLADVPCSIPLDSSSIGMHAQALLSNQPIWQSSGGAPGPDLLTGYEAASSGGEKTRLLVPVAGGIVELFASRYMVEEQQMAELVMAQCGGGGQGWQETEAQGFAWDAAAAADSGRLYAAASLNLFDGAGGSGSGEPFLAGVQDDGAAGVGWQYAAESSEPPSTVAQEHQQLHGSGVGRADSGSEGSDMQLGDPDDDGNGETQRGSGKDGKDAEGKRQQCKNLEAERKRRRKLNDRLYKLRSLVPNITKMDRASILGDAIDYIVGLQKQVKDLQDELEDPNPPGVTGGDSKAPDVLLDDHPPPGLDNDEDSPQQQPFPSAGGKRPRKEEAGDEEEKEAEDQDMEPQVEVRQVEGKEFFLQVLCSHKSGRFVRIMDEIAALGLQITSVNVTSYNKLVLNVFRAVMKDNEAAVPADRVRDSLLEVTREMYGGAGAWSSPVPPPPLTNAKLDGMDGQAVPTVAGEHYQLHHQVLGGYHHQHLQYLAMD

SEQ ID NO: 31 - protein, 553 aa, Triticum aestivum
MGGGDYHQQSLNGGAAVHGHGGGGGGTVEAALRPLVGGSHGWDYCIYWRLSPDQRFLEMAGFCCSAEFEAQVATLADVPCSIPLDSSSVGMHAQALLSNQPIWQSSGGSPGPDLLTGYEAASSGGEKTRLLVPVAGGIVELFASRYMAEEQQMAELVMAQCGGGGQGWQETEAQGFAWDAAAADPGRLYAAASLNLFDGAGGSGSGEPFLAGVQEDGAAGVGWQYAAESSEPPSTVAQEHQQLHGSGVGRADSGSEGSDMQLGDPDDEVDGETQRGSGKDGCGKRQQCKNLEAERKRRKKLNERLYKLRSLVPNITKMDRASILGDAIDYIVGLQKQVKDLQDELEDPNLPGITGGDSKAPDVLLDDHPPPGLDNDEDSPQQQPFPSAGGKRLRKEEAGDEEEKEAEDQDMEPQVEVRQVEGKEFFLQVLCSHKSGRFVRIMDEIAALGLQITSINVTSYNKLVLNVFRAVMKDNEAAVPADRVRDSLLEVTREMYSGGGTWSSPVPPPPPTNAKLDGMDGQAVPAAAGDHYQLHHQVLGGYHHQHLQYLAMD

SEQ ID NO: 32 - protein, 554 aa, Triticum aestivum
MAGGDYHQQSIIGGRAAVHGHGGGGGGTVEAALRPLVGGAHGWDYCIYWRLSPDQRFLEMTGFCCSAEFEAQVATLADVPSSIPLDSSSIGMHAQALLSNQPIWQSSGGAPGPDLLTGYEASSSGGEKTRLLVPVAGGIVELFASRYMAEEQQMAELVMAQCGGGGQGWQETEAQGFAWDAAAADPGRLYAAASLNLFDGAGGSGSGEPFLAGVQEDGAAGVGWQYAAESSEPPSTVAQEHQQLHGSGVGRADSGSERSDMQLGDPDDNVDGETQRGSGKDGGGKRQQCKNLIAERKRRKKLNNRLYTLRSLVPNITKMDRASILGDAIDYIVGLQKQVKDLQDELEDPNPPGVTGGHSKAPDVLLDDHPPPGLDNDEDSPQQQPFPSAAGKRPRKVEAGEEEEKEAEDQDMEPQVEVRQVEGKEFFLQVLCSHKSGRFVRVMDEIAALGLQITSVNVTSYNKLVLNVFRAVMKDNEAAVPADRVRDSLLEVTREMYGGGGAWSSPLPPPPPTNAKLDGMDGQAVPAAAGDHYQLHHQVLGGYHHQHLQYLAMD

SEQ ID NO: 33 - protein, 248 aa, Triticum aestivum
MCTATPQSASARCCLVNMIVGGGYFEGSHDHNLMPGSLIKPDFANERQRREWMNVAFWALRILLPDPKDDRVSNVEDAIEYIHELNRTVKELKILVEQKRHGTNRKKMIKMDEEAASDGENSSTMPVRDEQDNELDWAIRSSWVQRRSQECRVDVHIVENAVNVQLTEWKNANSLPHAAKVLDEFHLEIISVVGQIVGDHRIFIFNTKVSEGCSVYALAVAERLFQAVDAQHQALNILGQALATKLTI

SEQ ID NO: 34 - protein, 482 aa, Triticum aestivum
  MOD_RES (36)..(37): Any amino acid
MGLLYTEEQTATLHSLKLHGSTSFATTKTARPTAIXXHDSSLAPKCNDNTNIELQRFKVQSFSADILSDSTNLSSEAARAINHLQHQLGIGLEQDMPPVGTATWDTSICTIQDQIINHQLSEDPQNILVQQQIQQYDAALYPNSGYTPAPDLLNLLHCTVAPVFPATASVFGDTALSGDTNYLDLNGEFTGVAAIPDSGLMYTSDPALQLGYHAAQSHALKDICHSLPQNYGLFPSEDERDVMLGVGSVGGDLFQDIDDRQFDTVLEGRRGKGEFGKGKGKANFATERERREQLNVKYKTLRMLFPNPTKNDRASVVGDAIEYIDELNRTVKELKILVEQKWHGTNRRKIRKLDEEAAADGESSSMRPMRDEQDNQLDGAIRSSWVQRRSRECHVDVRIVENEINIKLTEKKKTNSSLLHVAKVLDEFHLEIIHVVGGIIGDHYIFMFNTKVTEGSSVYACAVAKRILQAVDAQHQALDIFN

SEQ ID NO: 35 - protein, 387 aa, Triticum aestivum
MPPVETATWDTSICTIQDQIINHQLSEDPQNILVQQQIQQYDAALYPNSGYTPAPDLLNLLHCTVAPVFPATASVFGDTALSGGTNYLDLNGEFTGVAAIPDSGLMYTSDPALQLGYHAAPSHALKDICHSLPQNYGLFPSEDERDVMLGVGSVGGDLFQDMDDRQFETVLEGRRGKGEFGKGKGKANFATERERREQLNVKYKTLRMLFPNPTKNDRASVVGDAIEYIDELNRTVKELKILVEQKWHGTNRRRTRKLDEEAAADGESSSMRPMRDEQDNQLDGAIRSSWVQRRSRECHVDVRIVENEINIKLTEKKKANSSLLHVAKVLDEFHLEIIHVVGGIIGDHYIFMFNTKVTEGSSVYACAVAKRILQAVDAQHQALDIFN

SEQ ID NO: 36 - DNA, 1665 bp, Triticum aestivum
atgggaggaggagattatcaccagcagagcctcatcggcggtgcggctgttcatggccatggagggggcaccgtggaggctgcgctgaggccgctcgtcggcggctcccacggctgggactactgcatgtactggcggctctctcctgaccagaggttcttggagatggcgggtttttgctgcagcgccgagttcgaggcgcaggtggccacgctcgccgacgtcccttgctccatccctcttgactcctcctccatcgggatgcacgctcaggcgctactgtcgaaccagccaatctggcagagcagcggcggggcgccgggtccggatctcctcacgggctacgaggctgcctccagcggcggcgagaagacgcggctcctcgtccccgtcgccggcgggatcgtcgagctcttcgcgtcgagatatatggtcgaggagcagcagatggcggagctggtcatggcgcagtgcggtggcggtgggcaggggtggcaggagacggaggcgcaggggttcgcgtgggacgcggcggcggcggcagactcggggcggctctacgcggcggcgtcgctcaacctgttcgacggcgccgggggaagcggctccggcgagccgttcctggcgggagtgcaggacgacggcgcggcgggcgtggggtggcagtacgcggcggagagcagcgagccgccgtcgacagtggcgcaggagcatcagcagctgcacggctcgggcgtggggagggcagattcagggtcggaggggagcgatatgcagctgggggaccccgacgacgacggcaacggcgagacgcagaggggctccggcaaagacggcaaagacgcagaggggaagcggcagcagtgcaagaacctcgaggcggagcggaagcggcgcaggaagctcaacgaccgcctgtacaaactccggtccctcgtccccaacattactaagatggaccgggcgtcgatcctcggggacgcgatcgactacatcgtggggctgcagaagcaggtgaaggacctgcaggacgagctggaggacccgaacccgccgggggtcaccggcggcgacagcaaggcccccgacgtgctcctcgacgaccacccgccgccgggcctcgacaacgacgaggactcgccgcagcagcagccgttcccgtcggccggcgggaagcggccccggaaggaggaggccggcgacgaggaggagaaggaggcggaggaccaggacatggagccgcaggtggaggtccggcaggtggaggggaaggagttcttcctgcaggtgctctgctcccacaagtccgggcgcttcgtccgcatcatggacgagatcgccgccctcggcctccagatcaccagcgtcaacgtcacctcctacaacaagctcgtcctcaacgtcttccgggccgtcatgaaggacaacgaggcggcggtgccggcggacagggtgagggactcgctgctggaggtgacgagggagatgtacggcggggccggggcgtggtcgtccccggtccctccgccgccgctgacaaacgcgaagctcgatggtatggacgggcaggcggtgccgacggtggccggggagcactaccagctgcaccaccaggtgctgggaggatatcatcaccagcatctgcagtacctcgccatggattga

SEQ ID NO: 37 - DNA, 1662 bp, Triticum aestivum
atgggaggaggagattatcaccagcagagcctcaacggcggtgcggctgttcatgggcatggagggggagggggcggcaccgtggaggctgcgctgaggccgctcgtcggcggctcccacggctgggactactgcatctactggcggctctctcctgaccagaggttcttggagatggcggggttttgctgcagcgccgagttcgaggcgcaggtggccacgctcgccgacgtgccttgctccatccctcttgactcctcctccgtcgggatgcacgctcaggcgctactgtcgaaccagccaatctggcagagcagtggcgggtcgccgggcccggatctcctcacgggctacgaggctgcctccagcggcggcgagaagacgcggctcctcgtccccgtcgccggcgggatcgtcgagctcttcgcgtcgagatatatggcggaggagcagcagatggctgagctggtcatggcgcagtgcggtggcggtgggcaggggtggcaggagacggaggcgcaggggttcgcgtgggacgcggcggcggcagaccccgggcggctctacgcggcggcgtcgctcaacctattcgacggcgccgggggaagcggctccggcgagccgttcctggcgggagtgcaggaggatggcgcggcgggcgtggggtggcagtacgcggcagagagcagcgagccgccgtcgacggtggcgcaggagcatcagcagctgcacggctcgggcgtggggagggcagattcggggtcggaggggagcgatatgcagctgggagaccccgacgacgaagtcgacggcgagacgcagaggggctccggcaaagacggctgcgggaagcggcagcagtgcaagaacctcgaggcggagcggaagcggcggaagaagctcaacgaacgcctctacaagctccggtccctcgtcccaaacattaccaagatggaccgggcgtcgatcctcggggacgcgatcgactacatagtggggctgcagaagcaggtgaaggacctgcaggacgagctggaggacccaaacctgccggggatcaccggcggcgacagcaaggcccccgacgtgctcctcgacgaccacccgccgccgggcctcgacaacgacgaggactcgccgcagcagcagccgttcccgtccgccggcggcaagcggctccggaaggaggaggcgggcgacgaggaggagaaggaggcggaggaccaggacatggagccgcaggtggaggtccggcaggtggaggggaaggagttcttcctacaggtgctgtgctcccacaagtccgggcgcttcgtccgcatcatggacgagatcgccgccctcggcctccagattaccagcatcaacgtcacctcctacaacaagctcgtcctcaacgtcttccgcgccgtcatgaaggacaacgaggcggcggtgccggcggacagggtgagggactcgctgctggaggtgaccagggagatgtacagcgggggcggcacgtggtcgtccccggtccctccgccgccgccgacaaacgcaaagctcgatggcatggacgggcaggcggtgccggcggccgccggggaccactaccagctgcaccaccaggtgctgggaggatatcatcaccagcatctgcagtacctcgccatggattga

SEQ ID NO: 38 - DNA, 1665 bp, Triticum aestivum
atggcaggaggagactatcaccagcagagcatcatcggcggccgtgcggctgttcatggccatggagggggaggcggcggcaccgtggaggctgcgctcaggccgctcgtcggcggcgcccacggctgggactactgcatctactggcggctctctcctgaccagcggttcttggagatgacggggttctgctgcagcgcggagttcgaggcgcaggtggccacgctcgccgacgtcccttcctccatccctctcgactcctcctccatcgggatgcacgctcaggccctgctgtcgaaccagccgatctggcagagcagcggcggggcgccgggtccggatctactcacgggctacgaggcttcctccagcggcggcgagaagacacggctcctcgtccccgtcgccggcggcatcgtcgagctcttcgcttcaagatacatggcggaggagcagcagatggcggagctggtcatggcgcagtgcggcggcggtgggcagggatggcaggagacggaggcgcaggggtttgcgtgggacgcggcagcggcagacccggggcggctctacgcggcggcgtcgctcaacctgttcgacggcgccgggggaagcggctcgggcgagccgttcctggcgggagtgcaggaggacggcgcggcgggcgtgggttggcagtacgcggcagagagcagcgagccgccgtcgacggtggcgcaggagcatcagcagctgcacggctcgggcgtggggagggcggactcggggtcggagaggagtgacatgcagctgggggaccccgacgacaacgtcgacggcgagacgcagaggggctccggcaaagacggcggcgggaagcggcagcagtgcaagaacctcatcgcggagcggaagcggcgcaagaagctcaacaaccgcctctacacgctccggtccctcgtccccaacatcaccaagatggaccgtgcgtcgatcctcggggacgcgatcgactacatcgtggggctgcagaagcaggtgaaggacctgcaggacgagctggaggacccgaacccgccgggggtcaccggcggccacagcaaggcccccgacgtgctcctcgacgaccacccgccgccgggcctcgacaacgacgaggactcgccgcagcagcagccgttcccgtccgccgccggcaagcggccccggaaggtggaggcgggcgaggaggaggagaaggaggcggaggaccaggacatggagccgcaggtggaggtccggcaggtggaggggaaggagttcttcctgcaggtgctgtgctcccacaagtccgggcgcttcgtccgcgtcatggacgagatcgccgccctcggcctccagatcaccagcgtcaacgtcacctcctacaacaagctcgtcctcaacgtcttccgcgccgtcatgaaggacaacgaggcggcggtgccggcggacagggtgagggactcgctgctggaggtgacgagggagatgtacggcgggggcggcgcgtggtcgtccccgctccccccgccgccgccgacgaacgcgaagctcgatggcatggacgggcaggcggtgccggcggcggccggggaccactaccagctgcaccaccaggtgctgggaggatatcaccaccagcatctgcagtacctcgccatggattga

SEQ ID NO: 39 - DNA, 747 bp, Triticum aestivum
atgtgcactgcaactccgcagtctgcaagtgccaggtgctgtttggtcaatatgattgttgggggtggctattttgaaggttcccatgatcataatctcatgccgggatctttaataaaacctgactttgcaaatgagaggcagaggagggaatggatgaatgtagcgttctgggctttaagaatcctcctccccgatcccaaggacgacagggtctcaaatgtagaggatgccattgaatacatacatgagctgaaccggacagtgaaggaactgaagatcctagtagaacagaagaggcatgggactaataggaaaaagatgataaagatggacgaagaggcagcttccgatggcgagaactcatcgacgatgccagtgagggatgagcaagacaatgagctcgattgggccataaggagctcctgggtgcagaggaggtcccaggaatgccgtgttgatgtccacatagtggaaaatgcagtaaacgtccagctcactgaatggaagaacgccaactccctgcctcatgccgcgaaggttctcgacgagttccatcttgagatcatcagcgtggtcggacagattgttggcgatcaccgcatattcatcttcaacactaaggtatctgaaggctgctcggtgtatgcccttgcagtggccgagaggctctttcaagcagttgatgcacagcaccaggccctcaacatactcggccaggctctagcaaccaaactgactatctga

SEQ ID NO: 40 - DNA, 1662 bp, Triticum aestivum; identical to SEQ ID NO: 37

SEQ ID NO: 41 - DNA, 1164 bp, Triticum aestivum
atgccaccagtggaaactgcgacctgggatacttctatctgcaccattcaagaccaaataatcaaccatcagcttagcgaagatccacaaaacatattggtgcaacaacagattcaacagtatgatgctgcgctttatccaaacagtggttacacaccagcacctgatctcttaaaccttctccactgcactgtggctccagtgttccctgcaacagcatcagtctttggtgatacagcactaagtggtggtaccaactatttggatcttaatggtgagtttacaggagtggcagcaattcctgacagcggattaatgtacactagtgatccggcattgcagttagggtaccatgctgccccgtctcacgcactaaaggatatctgccattcactgccgcaaaattatggactgttccccagtgaggatgaaagagatgtcatgcttggggttggaagtgtcggaggagatctttttcaggatatggatgacaggcaatttgaaactgtactggagggcagaagagggaagggtgagttcggaaagggaaaaggaaaagctaactttgcgactgagagagagaggagggaacagctaaatgtgaagtataagactttaagaatgctcttccccaatcctaccaagaatgacagggcttcagtagtaggtgatgccattgaatacatagatgagctgaatcgaacagtgaaggaactgaagatcctagtggaacagaagtggcatgggactaataggagaaggacaagaaagttggatgaagaggcggctgctgatggtgaaagctcatcgatgaggccaatgagggatgagcaagacaatcagcttgatggggccataagaagctcatgggttcagaggaggtccagggagtgccatgttgatgttcgcatagtggaaaatgaaataaacatcaagctcacagaaaagaagaaggccaactcctccctgcttcatgttgcaaaggttcttgacgaattccatcttgagatcatccatgtggttggagggattattggtgatcactacatattcatgtttaacactaaggtgactgaaggttcctcagtttatgcttgtgcagtggcaaagaggatccttcaggcagtggatgcacaacaccaggcacttgacatattcaactag

SEQ ID NO: 42 - DNA, 6080 bp, Triticum aestivum
gaccccaaagttggggcagtccaacgaacgctagacgaaacaagcaggaaaacaaaattaaatcatgaaagtgccctttcgaacaaggcaagttactagcgaggggcatactgaagcagaattgtttcatcgacagcagaaaggtcaacgtcatttcattcgtgtagcatgctggtcttacaacactacctctaagtacgtaccgatttccagatgaagaataattggggcgctttcgccttacgaaaagaaagcaagcaagaagagatcatgggcgtaatcacaccgctgatggtacatttcatgcctgaaattgcatcttgttataacccgagagatccatccatctattgtgaccatctttcttttctggctttctattgcggccatgcatttcatgccttgctgaaattgtagatgtcccgcttcaagaaatccccccccccccccttttccttttttttttgccttggtgttgtatgttcttttacatcatggtaatgatcagaaggttttatggaatatgtttccttataaaatcattgaaaaaactctcacctgataaggatgtattagtgtgtgatcccaagattggggcagcccatcggacggtggacgaaacaagcaggaaaacaaaattcgagcacgaacgttccctttcgaaaggccaagttactagcggaggggcaaaccgaagcagaactgtttcatcgacaacagaaaggtcgaggtcatttcattcctgcggcgtgcgggttttctgtcactacctctaagaacatattgatctccagatgacaaaaaatcggagcgctttcgtttcgccttactataataaagcaagcataatcatactgctgatggcacgtctcgtgcctgaaattgcaagacagttctgtttcagtaatccagccgtccattgctccttcttttctttttcgcccctaggaaaatttctgttgtgtgtgttcttttaggtgataaacgaatcatgatgaagatgaactgagtgatgcgtgaacggtacagtaacacatttcgtcagcagatatcttcactagccggccttgccgatgcaaacaacctccgatgtcaccccgtccttcctctcatccctgggctgggcgaaatggcatgcgtgcccctgctcctcttaggtgcctcctcgttagacggcatgtcaccaacgtcatttcctggctggatcatgagaatgtggcagtgtgcacactgcatccccatgacaccacacctttcagagaagaactgagcatcacaattgcatcttgcttaactaggcaattaatcaactgagccacaccatttgcattgtgcaagttcgagccaaatctgtggccggcactagtagtggagttaagctaaatgaattaagttaaccaggggtgtggattttgaaatccctcacacctttgttgcaccccacctacccataacagcccccgattgagcgcggcgatgataccggtggcgatggataaaagagagagcacattcatgctaatcatcaggttttcaccagcaattaggcacttgcatttctgaattgcgtccccaaaatggcatagaggtgtatggccctatgctttgcggatgatgcaacacccctgcagctagctagcagcattcagttgagatggttcttcggttagcgattgctttcagctggtacacgccgtttttccggatcggtccgtctgccggccgttcgctgggcagcctctactgaaaggtagctttctcctgagcccatccaagaacaaccatgacaatgacaccaagcagtctaggtttatgcaattctgttactagctcacacttgattttgatcctctgcttgctgatgatcatgatgcatgcatgatagtactagtactatataatgtgttgtacaacctttgctggcagcaatcgtatgtagtctgaagtttcttgcagccctgtgacaccggtgacatcaacaaatcctatcctgattcctggcagcagagaaagccttgcgtatgcatggattgaattgattgcactgcttcgatggatgtgtcactcacttcacttgctcaatcctaggacaagctgaccactggtgctgagctgggctgagctgagccatgggaggaggagattatcaccagcagagcctcatcggcggtgcggctgttcatggccatggagggggcaccgtggaggctgcgctgaggccgctcgtcggcggctcccacggctgggactactgcatgtactggcggctctctcctgaccagaggtatggacgcgtctgcgtgtgtgttcgatttattgttcataccatttgtgttcccagagcttgatgatgatgattcatggcgggggtgacggatatacggtaggttcttggagatggcgggtttttgctgcagcgccgagttcgaggcgcaggtggccacgctcgccgacgtcccttgctccatccctcttgactcctcctccatcgggtaattaaactggcttcttcttcttctcctggatgcaattgcctgccggccatgtcgatcgccattaagttttggtcggcgctctgtttgactgctgattttgttggctggtcttggtcaggatgcacgctcaggcgctactgtcgaaccagccaatctggcagagcagcggcggggcgccgggtccggatctcctcacgggctacgaggctgcctccagcggcggcgagaagacgcggctcctcgtccccgtcgccggcgggatcgtcgagctcttcgcgtcgagatatgtacgtgcgtgcgtgcgtgccgggtgatgggaaatatcgcttagttttggaagtagttagggagcacgccgttcgcgtgagccgacgcgacggcggcgacaacggcggtgcaccgtacgcaacagccttcgcgtttccgtggtccgtatatatatacggctgacctgactgggtgccattaacgcagatggtcgaggagcagcagatggcggagctggtcatggcgcagtgcggtggcggtgggcaggggtggcaggagacggaggcgcaggggttcgcgtgggacgcggcggcggcggcagactcggggcggctctacgcggcggcgtcgctcaacctgttcgacggcgccgggggaagcggctccggcgagccgttcctggcgggagtgcaggacgacggcgcggcgggcgtggggtggcagtacgcggcggagagcagcgagccgccgtcgacagtggcgcaggagcatcagcagctgcacggctcgggcgtggggagggcagattcagggtcggaggggagcgatatgcagctgggggaccccgacgacgacggcaacggcgagacgcagaggggctccggcaaagacggcaaagacgcagaggggaagcggcagcagtgcaagaacctcgaggcggagcggaagcggcgcaggaagctcaacgaccgcctgtacaaactccggtccctcgtccccaacattactaaggtaatcactatcgtccttccatggccgccggcccgccgccacccgccatgcatgattcttgtaaatttcaaagctcaaagagagcgcgtggatccatgtgggcagatggaccgggcgtcgatcctcggggacgcgatcgactacatcgtggggctgcagaagcaggtgaaggacctgcaggacgagctggaggacccgaacccgccgggggtcaccggcggcgacagcaaggcccccgacgtgctcctcgacgaccacccgccgccgggcctcgacaacgacgaggactcgccgcagcagcagccgttcccgtcggccggcgggaagcggccccggaaggaggaggccggcgacgaggaggagaaggaggcggaggaccaggacatggagccgcaggtggaggtccggcaggtggaggggaaggagttcttcctgcaggtgctctgctcccacaagtccgggcgcttcgtccgcatcatggacgagatcgccgccctcggcctccagatcaccagcgtcaacgtcacctcctacaacaagctcgtcctcaacgtcttccgggccgtcgtacgttccgctcccgccggccgatcgccattgctgtagcctgctggatatagggattcacggtggccttaatttggttggtttgcagatgaaggacaacgaggcggcggtgccggcggacagggtgagggactcgctgctggaggtgacgagggagatgtacggcggggccggggcgtggtcgtccccggtccctccgccgccgctgacaaacgcgaagctcgatggtatggacgggcaggcggtgccgacggtggccggggagcactaccagctgcaccaccaggtgctgggaggatatcatcaccagcatctgcagtacctcgccatggattgattcatcccctttattacttgctactataggtccatggatggattagttttctttttctttagcaaaagaaaaagagggttccctctccgatttcgttaatgaaaccaaagacaaccaaaactaccagggtttcccctgctttacatataaaacaaccaacatcgattacatagcaacgttgggcgagcagcacaccaagaaagaaacgagaaagaaagaacaaaaagaaacaaatgccaacaacagcagcacgacaaaacgtggatgacccgccaccgctgcatcctccggattcatcccaccaccgcccaaggatctgcaccaccatggaccaagcagcaccacgaagaaggaatgcgatgccgacgaagctgctgcctggaggtgtcctagggttttccctggcacgcgaaggggagtgggggctgagcaccaccgccatccttcaggaaggaatggcggcaccgtgtcggcaccggaagaactggcagggttttctccagtcggtgtaatgagaaccagggtctcactaacctctaaagatgggccatgacagtgctcagcaacgctcggcaatcatttcgccggcaagcactactcccgtgcggggagcgtctctcctgcggcatggatcaacactcaagcaaaccaaccagaagatcccccaggaaggcctcccctgccgggtagacgagtctagcggagtcaagaccatgcccgggatcgagtccaagccactccagcagggtctctggggccgccaagccaaaccccggaaagcctcggaccggcaagcaaattccttgagaccccggcaagcctcggatcggcaagcaagttccttgccgcccggcaagtattgacccgacaagctgcggaacggcaagcaaaattccttgccggcactctatatcaattaaaggcacgacattagataaatgaggactgcatggccatgtattcatccaccactctagaactacctctattggagtcttcccaagcacgtgtcaagatggcatggctagatgctcaagtggtggtgactaggcatgctacttttccaagtggtgcatttaattcactgtcagtgatgaggatgatcacactgtagtaactttacacctcttgtatgcactgtacgccaccattggagaccccttggacatataaaaggaggcccaaggcatagcagaagggggcttctggccgagttgatacgggtagctactgtgtgcggtttatcacagagaagcaggattagggttttacgcattcttgcggcccgaatctaggtaaacgatccttgtgctgaccgccagacccgctctttccacagccccgtgcccgccaaccgtagaagggattccccgtgatcccataggtgtcattccaccgacatctttggcgcgccaggcaggggcggcgcagttgtgaaaatctggtctagcagttagcgcatcagtttcttcaagatcatcatcatcaccttccatggcgcccatgaaaaagggctctatgacaatgaagctttccacgtccaagcttccttcacccacacatgcggatggtgcgggcggcgctactggcgcagacggcgcggctgctgcggtaggcatgaccggcgcaggcgacgtggtcgccgtgcccgctgcagcaagagcgggcgatggagatgctgg

SEQ ID NO: 43 - DNA, 5489 bp, Triticum aestivum
tatgtttacgaagcgggacgaaactaagaatatcacctccctttaatagtaggtatagatatagatatagatatagatatagattgacggaaagacaaagagcaagagttctggttggtcaaattggataccaattttggcaggaacattgttcattggcactattactcgaacagacgccttataaaatcattgaacaaactctcacctgatatggatatattagtgtgtgatcacaagattggggcagcccgttggacggtagacgaaacaagcaggaaagctaaattcaagcacgaacgaaaggccaagttactagcggaggggcaaaccgaagcagaactgtttgatcgacaacagaaaggtcgaggtcatttcactcctgcagcgtgcgggttttctcttttctgtcactactcactacctctaagaacgtatcgatctccagatgatgaaaaatcggtccgctttcgtttcgccttatactccctccgtcccaaatttcttgtcttagatttgtctagatatggatgtacctaatactaaaacatgacttgatacattcgtatttggacaaatctaaaacaagaattttgggacggagggagtactaaaataaagcaagcataatcatactgctgatggcacgtctcgtgcctgaaattgcaaaacagttctgtttcagaaatccagccgtccattgctccttctttgctttttcgcccatacgaaaatttcttttgtgtctgtcctcttaggtgatgaacgatcatgatgaagatgaactgagtgatgcgtggactgtacagtaacacatttcgtcagctgatatcttcaccagcgaagcagccggcctttgccgatgcaaacaacctccgatgtcagcccgtccagctctcatccttgggcaaaatgtcatgcgtgcccctcctctttgcttgatcatgagaaagtggcagtgtgcacactgcatccccatgacaccacacctttcagagaagaaccgggcatcagaattgcatcttgcttaactatgcattaatcaattgaaccacatcatttgcattgtgtaagtttgagtcaaatctgtggccagcattagtagtggagttaagttaaatgaatgaagttgtaccggggtgtggattttgaaatccctcacacctttgttgcaccccacctacccgtaacaggctaacagcctccgatcgagcacggcgatgataccggtggcgatggataaaagagagagcacactcatgctaatcatcaggttttcaccagcaattaggcacttgcatttctgaattgcgtccccaaaatggcatagaggtgtatggccctatgctttgctgatgaatgatgatgcaacacccctgcagctagcagcattcagttgagatggttcttcggttagcgattgctttcagctgatacacgccgtttttccggatcggtccatctgccggcggatcgccaggcagcctctactgaaaggtagctttctcctgagcccatccaagaacaaccatgacaatgacaccaagcagtctaggtttatgcaattttgttactagttcacccttgtttttgatcctctgcttgctgatgatcatgatgcatgcatgatagtactagctagtactatataatgtgttgtacaagctttgctggctgcaatggtatgtaataatctgaagtttcttgctggcctgtgacaccggtgacatcaacaaatcctatcctgattcctgacagcagctggctagcagcagcgaaagccttacgtatgcatggattgaattgatcgatgtgtcactcacttcacttgctcaatcctaggacaagctgaccactggtgcttagctgggctgagctgagccatgggaggaggagattatcaccagcagagcctcaacggcggtgcggctgttcatgggcatggagggggagggggcggcaccgtggaggctgcgctgaggccgctcgtcggcggctcccacggctgggactactgcatctactggcggctctctcctgaccagaggtatggacgcttctgcgtgtgtgttcgatttattgttcataccatttgtgttcccagagcttgatgatgatgattcatggcggcgatgacggacatacggcaggttcttggagatggcggggttttgctgcagcgccgagttcgaggcgcaggtggccacgctcgccgacgtgccttgctccatccctcttgactcctcctccgtcgggtaattaaactggcttcttcttcttctcctggatgcaattgcctgccggtcatgtcggtcgccaatcgccattaagttttggtcggcgctctgtttgactgctgattttgttggctggtcttggtcaggatgcacgctcaggcgctactgtcgaaccagccaatctggcagagcagtggcgggtcgccgggcccggatctcctcacgggctacgaggctgcctccagcggcggcgagaagacgcggctcctcgtccccgtcgccggcgggatcgtcgagctcttcgcgtcgagatatgtacgtgcgtgcgtggccggtgatgggaaatatcggttagttttggaggtagttagggagcacgccgttcgcgtgagccgacgcggcggcggcggcaacggcggtgcaccgtacgcaacagccttcgcgtttccatggtccgtttatatatacggctgactgctgacatgactcggtgcgattaatgcagatggcggaggagcagcagatggctgagctggtcatggcgcagtgcggtggcggtgggcaggggtggcaggagacggaggcgcaggggttcgcgtgggacgcggcggcggcagaccccgggcggctctacgcggcggcgtcgctcaacctattcgacggcgccgggggaagcggctccggcgagccgttcctggcgggagtgcaggaggatggcgcggcgggcgtggggtggcagtacgcggcagagagcagcgagccgccgtcgacggtggcgcaggagcatcagcagctgcacggctcgggcgtggggagggcagattcggggtcggaggggagcgatatgcagctgggagaccccgacgacgaagtcgacggcgagacgcagaggggctccggcaaagacggctgcgggaagcggcagcagtgcaagaacctcgaggcggagcggaagcggcggaagaagctcaacgaacgcctctacaagctccggtccctcgtcccaaacattaccaaggtaatcactatcatccttctatggccgccgccacccgccatgcacgattcttgtaaatttcaaagcgtcgatccatgtcggcagatggaccgggcgtcgatcctcggggacgcgatcgactacatagtggggctgcagaagcaggtgaaggacctgcaggacgagctggaggacccaaacctgccggggatcaccggcggcgacagcaaggcccccgacgtgctcctcgacgaccacccgccgccgggcctcgacaacgacgaggactcgccgcagcagcagccgttcccgtccgccggcggcaagcggctccggaaggaggaggcgggcgacgaggaggagaaggaggcggaggaccaggacatggagccgcaggtggaggtccggcaggtggaggggaaggagttcttcctacaggtgctgtgctcccacaagtccgggcgcttcgtccgcatcatggacgagatcgccgccctcggcctccagattaccagcatcaacgtcacctcctacaacaagctcgtcctcaacgtcttccgcgccgtcgtacgttccgctctcgccggcgatccccgccggccgatcgccattgttgcagcctgccgatagagattcacggtgggctttggttggttcgcagatgaaggacaacgaggcggcggtgccggcggacagggtgagggactcgctgctggaggtgaccagggagatgtacagcgggggcggcacgtggtcgtccccggtccctccgccgccgccgacaaacgcaaagctcgatggcatggacgggcaggcggtgccggcggccgccggggaccactaccagctgcaccaccaggtgctgggaggatatcatcaccagcatctgcagtacctcgccatggattgattcatcatcccctttattacttgctactatcgatcggttcatggatggattagcttttttttttatagaatataaaagagggtgccctctccaatttcattaacgaaaccaaagacaatcattactaccgaaaaaggatttccccgctttatttataaagcaaccaacaccgatcacataggaacgctgcgcgagcagcacaccaagcacacatagcaccgccgcgtaccaagcagcaccacgaagaagaaatgtgatgccgacgacgctgctaaccggaggtgtcctagggtttcccccggcatgctggggggattggggggggggggctgagcaccaccgatacccttcaggaaggagtgtaggcacccgcaggcgtcaccgcgtcgttgctggaagaaccggcagggatttctcccgcacaccaaactccactgtccaaccgatctggagccaaccatccaatttgccgcctaccaacatgtaccaccacggtcttgatgcctcccgcgctactgcactaagatcaccaccacgaggccgagaggacggagagaggagcgccaagatcgggagcggcagcactggaggcccgcgggagggaactacctccactgccgtcgtgcgggaagcccatgcctccaacaccatcgcggtcgccatccggatgcggcaacaggtataccagaccacccttgcccggccaggccaaaaacgggcccgcaaagacggcatcaatgccgccaccaacccaacgccgctcctccgcccctggaagccatgccgacaactcaccccaccgccggcccgcccagacccagatggcctagatctgggccgagcgggtgccgccagatcgcgccgccaacggcagcaccgccgccagcagacccccacgcccgcgactggtcgcccagccaccgcgcaggaccaccgccgcctaggtacattcccatgcgccgccccgccccgcatcagcgtgacactgagaagagaaaggccaggggccatcggcaccgcctgggccaggcccgccgcgggatgccaccgacagcgatgggaaggaacgagctggggaggagccggggatgcgacacggccacgagtggggaggaggggttaaagacaaccatccaatagtttgaagtactatcaaactacctccagctactaagtagtttcgagctagtctaggtaattaataacagggtccaaactgttcggtttagtcccacataggctgtggggggagacataacacgacttataagggcgggggtgtcccctcctaacagactagtcttttgggggaagagggcccaaggcctctcataaatcggtgttg

SEQ ID NO: 44 - DNA, 5669 bp, Triticum aestivum
ttaatagcattagcaaacatttgctgcaacacacgtcaccttccagcgccccaaaaagaataagtgttggaccttccctcgtgtgtggcatgatgatcatattggcatgaccttcctaataataattgacatgcatccattggcaaaacatcatagatggctgtatcactatagtcgccaactagaaaattgacacgcaccttttgagtaacttccaattttcccgactgatataaccagtcgacgcagtgtggttgtgggtgcttccaggtaggcaaagctaaagcatccaccaagcccttgatgactgcattggtgtagcttccaccactgctgaaatttccttatatgccgggtgccaggctcttcgccgagagccaaaacatggacactcggcaaagtaaacaacgccgagagccacactcggcaaacctggcttcatgacaactagttgacgttgccgtcacgcgctcacggcgaacgagcaccgcacggcaaacggggcaggcgctgagagacacgcacggcaaagagaagccacgtggatgcccgttcggaactaacggtgccgtcacttggcttacctataccgagagccgcgacatcgccctcggtaaaaacacatcacagaaacattttactacctgacatgtggtcccactggtcacatttatcaataaaagttttaaattatttggtaaattattaataagaataatatgacgatgtctttgccgagagccatgctcagcaatgcccgaataggacgcggtacaaattatgaagcgcgcgcggtccggcgccccaaatttgcaacgcatgatagtgctttttagcgcgtgctctaaacttttttgcgcgcgcactattttgcaacatctgctagagcgtctccgcgcccaaaaagaacggcttttagcgcgcggagcagtttttgcgcatccgttggagatgctctagaagaaagcaagcatactcatactaaatccatccatccattgctccttccttttcttttcggccgtaagaatttctgttgtgtctgtccttttacatcgtgtgtgaatgatcatgatgaactggctggtgcgtggacggtacagtaacacatttcgtcagcagatatcttcaccagcgaagcagccgatgcaaacagcctccgatgtcactccgtccttctcttagctgcctgggcgaaatgacgtgcttgcctgctcgtgccattagcgtcgctggatcatgagaaagtggcagtgtgcacactgcatccccatgaggtcatgacaccacaccttaccttccatagcagaactgggggcttggcctctcatcagaattgcatcttgcttaactgccattaatcaattgagcgagccacatcatttgcatttgcattggccatctttactggtagagtcaggataaatcaagttttgagatccctcacacctttcttgcaccccacctacccataacagcctccgatcacggcgatgataccagcgcggcgatggataaaaggcgagagcacattcatgctaattgtcaggttttcagttctcaccagtaatataattaggtacttgcatttctgaattgcatccccaaaatggcatagaggtgtatggccctatacatactttgctgatgagtgatgatgcaacacccctgttgcagccttcagttgaagcggttcttcagttagcaattgctttcggctgatccgtcgaccgaccgcgccggaaagcgttctgaaaggtagctttcttctgacaccatccaagaacagctagctataacggcagtcgtgctaggtttatgtaattctgttagctcacacttgattttgatcctctgtttgcttgctgatgatcatgatgaatgcatgcatgatactagtactgtataatgtactacctttgctgcatgcgatcgtgtgtagccctgtgacaccggtgacatcaacaaatcctatcctgattcctgacagcagggaaagccttgcgtgtatgatgtgtcactcacttgctcgatcctaggacaagctgaccactgcgcactggcgctgagctgagcgatggcaggaggagactatcaccagcagagcatcatcggcggccgtgcggctgttcatggccatggagggggaggcggcggcaccgtggaggctgcgctcaggccgctcgtcggcggcgcccacggctgggactactgcatctactggcggctctctcctgaccagcggtatgtgcgtgtgttcgattgttcatgcgattcttgcatgcagccagagcttgatgatgatgatccatcattcatggcaggttcttggagatgacggggttctgctgcagcgcggagttcgaggcgcaggtggccacgctcgccgacgtcccttcctccatccctctcgactcctcctccatcgggtaattgccggccggccaagtcgattgccgttaatttttggccggatctctgactgttgttttggttggttggtcaggatgcacgctcaggccctgctgtcgaaccagccgatctggcagagcagcggcggggcgccgggtccggatctactcacgggctacgaggcttcctccagcggcggcgagaagacacggctcctcgtccccgtcgccggcggcatcgtcgagctcttcgcttcaagatacgtacgtgcgtgcgtgcgtgcgtgcgtggccgatgatgggaaataaaaatatcagttaggtttggaagtagttagggagcacgcggttcccgtgagctgacgcgacggcggcggcaacggcggtgcaccgtacgcaacagccttcgcgtttccatggtgcgtggtgtatatatatggctgacctgactggggtgcgattaatgcagatggcggaggagcagcagatggcggagctggtcatggcgcagtgcggcggcggtgggcagggatggcaggagacggaggcgcaggggtttgcgtgggacgcggcagcggcagacccggggcggctctacgcggcggcgtcgctcaacctgttcgacggcgccgggggaagcggctcgggcgagccgttcctggcgggagtgcaggaggacggcgcggcgggcgtgggttggcagtacgcggcagagagcagcgagccgccgtcgacggtggcgcaggagcatcagcagctgcacggctcgggcgtggggagggcggactcggggtcggagaggagtgacatgcagctgggggaccccgacgacaacgtcgacggcgagacgcagaggggctccggcaaagacggcggcgggaagcggcagcagtgcaagaacctcatcgcggagcggaagcggcgcaagaagctcaacaaccgcctctacacgctccggtccctcgtccccaacatcaccaaggtaatcaccgtcatccatggccgccgccatgcacgattcttggctgcttgaaactaaggagcttcgatccatgtcggcagatggaccgtgcgtcgatcctcggggacgcgatcgactacatcgtggggctgcagaagcaggtgaaggacctgcaggacgagctggaggacccgaacccgccgggggtcaccggcggccacagcaaggcccccgacgtgctcctcgacgaccacccgccgccgggcctcgacaacgacgaggactcgccgcagcagcagccgttcccgtccgccgccggcaagcggccccggaaggtggaggcgggcgaggaggaggagaaggaggcggaggaccaggacatggagccgcaggtggaggtccggcaggtggaggggaaggagttcttcctgcaggtgctgtgctcccacaagtccgggcgcttcgtccgcgtcatggacgagatcgccgccctcggcctccagatcaccagcgtcaacgtcacctcctacaacaagctcgtcctcaacgtcttccgcgccgtcgtacgtcccgctctcgccggggatccccgccgggccgatcgccattgttgcatcctgctgatagggattcatggttggtttgcagatgaaggacaacgaggcggcggtgccggcggacagggtgagggactcgctgctggaggtgacgagggagatgtacggcgggggcggcgcgtggtcgtccccgctccccccgccgccgccgacgaacgcgaagctcgatggcatggacgggcaggcggtgccggcggcggccggggaccactaccagctgcaccaccaggtgctgggaggatatcaccaccagcatctgcagtacctcgccatggattgattgattccctttattactagccactataggtccatggatggattagttgatatagtacgtaattagttcccttcctgctcgtattttgttttctctttcatttaaatatgtgaagtttaactaattaactcgaggagaggacaatgaaatcaaattcgaaagcttctggccgaaagtctcggatcattctcacctctttgtggatctggacgcggactttcatgtgggcaagcgcttcaaattcgaaagcttctggccgaaagccgagggctttcttgacgtagtgcaggaggcatggaatgtggtgccgtcggaagggaaccctttcttggccctggataacaaactgcatgcgacggccaaagcattgcaaacgtggagtgacaagtggattgggaatgttaagctccaaatttccttggcgatggagatcattggacggcttgacaaggcagcagactcgcgccagctggcggacgacgaacatggattaaggaagttgctgaagagggatcttcttggcctctgctcgctcgagagatccattgcgaggcagagatcacggatttggcaacttaaagagggggaggcgaacacggctttcttccagcgacaggcaagattcaggcaaaagaagaatgtgatcacttctttgagccacgagggggtgctatacactgggcaggagagcatagcgaaggtggtggatgactactacgatgcattatttggttcttcggctcggcggttggcctcgatcaacttggacatgcttgatctcccatatatggatctcgcacacctcgaggcccagtttgaggaagaggaggttgagaaaattatcaaagcaatgccattggacaaggcaccaagcccggacggtttcactggccgttttctttgtgtcatgttggcacataatcaaagatgattttatgaaggctctgcggcagttccatgcgggagacatgagagggttggcttccatcaacaaggcgctggtttccctcctccccaagatccagggagcggtggatgtgaaagattttagaccggtgagccttataagtggaccagtgaagatcttcgacaaaattctggcaaccaggcttgcggaggacctgccaaggttggtggggcaccaccagagtgcatttgtgcgtggcagatcgcttcatgacaactatatgttggtgcaatgcacggctaggagattgcatgcgatgagacatccggcagtcctacttaaacttgacatcacgaaagcattcgatacaatccagtggccttttctacttcaggtgttgcggaggttgggattcggagccaaatggattgcatggatttgtggactgttggccacctcctccacgaggatcacggttaatggcttgcctggt

SEQ ID NO: 45 - DNA, 5049 bp, Triticum aestivum
  modified_base (1300)..(1353): a, c, t, g, unknown or other
cattgagacaagggagatgtcatgaaactcaagcataaacaagttacttgtctgatttcaaattgattgtggtactatcagttattctgtagtccatggctttaatccagaactgttagttatattttaaatcctaatcagttcatcactgacattgatctacctataaccctggtgaaaatgcaaaacatgaagatttagtgtttgaataccacttatcataaattatacgaaatctgaaggtatgacgccaccacattagtgacattataggagattacaatcaatcctaacaaatcctataccaccataacagccagatacactaacagacctgccatttctatcatgctcatccctcagtctcttgaagcggcaagcttactagaaaagcagatttaatgctacatatatattctggtggaagtttttctttaaatgtaactacagacttgatactcgataatctgtaccatgaaggtgaagatgtctaaatatttcatattttagtaaaccaagaacatcacaccaatatatacaaaaacatagataatcaaaagaataaggctgatatgaatattccataatacaagatcatgtgctctttggatacttgcaattctgtaggtagttgtagcacaccagtgcattcataaaatatggtaagggggcagaaggcatgacctacatttctcaacttcctgtgggtgaataacatcaaagatgccaaattcaaagggtgtgagctttccgtctttctcgtgtctgtctcctaataataacagaaacaataataaccatatgatagtcctttgcattgacctttagtatgggcgcattctgttattttctgccccatcatttttgtgtgacaaccaaattatggtttcatgacttaccgctataatattcttggcatagcacagaaactaggcttcatgggtcttcgagttgcagcttcatgaacaaagcctcgctcattcaatcatcagctgtaccaaaaagataggtatgttcacctctagtgcttattgctactgttcgctagatgtgatccctgattaacagttgctttttaagtcttagttggtgagattaaacatcaaaagattcagacaccatggatttcatgtgcttcattttactgatcatcttgcacttactgagttgtattaccattacaaattattccgtgctactaaacattttgctgattggctactgagcatgtggtagttgaagcacattgtatcaaacatcaaatatgaataggattagggaacagaaaaagatggtaagnnnnnnnnnnnnnnnnnnnnnnnnnnnnnnnnnnnnnnnnnnnnnnnnnnnnnnttggaggtgactattttgaaggttcccatgatcacaatctcatgacaggatctttgacccatgattcttctctggctcctaaatgcaacgacaacacaaatattgagctacagagattcaaggtgcagtcgttttctgcagatatcctttctgattcgaccaatctttcttctgaagctgcaagagcaatcaaccaccttcagcatcaactaggaattggtttggagcaggatatgcgaccagtggaaactgcgacctgggatacttctatctgcaccattcaagaccaaataatcaaccatcagcttagcgaagatccacaaaacatattggtgcaacaacagattcaacagtatgatgctgcgctttatccaaacagtggttacacaccagcacctgatctcttaaaccttctccactgcactgtggctccagtgttccctccaacagcatcagtttttggtgatacagcactaagtggtggtaccaactatttggatcttaatgatgagtttacaggagtggcagcaattcctgacagtggattaatgtacactagtgatccggcattgcagttagggtaccatgctgcccagtctcacgcactaaaggatatctgccattcactgccgcaaaattatgggctgttccccagtgaggatgaaagagatgccatccttggggttggaagtgtcggaggagatctttttcaggatatggatgacaggcaatttgatactgtactggagggcagaagagggaagggtgacttcggaaagggaaaaggaaaagctaactttgcgacagagagagagaggagggaacagctaaatgtgaagtataagactttaagaatgctcttccccaatcctaccaaggtttgtcttgttcatcattttgcacgtttaggagatttgatgattatcagatgtccagaatagtcaactatagaagctaatcactagggtttgttcaatgacgctacatgtacagaatacttcattaatagaagctaacaattaaaatttcaggccactttccagttttcattggttttgtgaagataattgaatttctgaataacttcatccatttactctcagtgtgttaagacacttagaagtggcaacaccaaagtactatgcagtccgataaaccagtgctttataaaacatcaacaaaaacccattcgcaaaactgtcatctgtctgatgtagattcaaagaaacatgtgttagataatatgcttctgctgaactttctgtcgaatagttctcaagctctgttgctacattatattcaggttgatactgatatcctatgaaacatgattgctatgaactagttgctcgttgtgctctttgcagatacttaccccattatcttgatcgagtgtgtttgtaccttctagttaattatgaaagaaaatgaaagcaatcaatattccatatgtatattgatttttttcataagtattattgtcctcattgcactactctccagcaaagtattgacctctatagtgatctaaccttaaccgattagacaacacttcctgatttactcaatgaaaacgtaaacaatgtgacagaatcataaaaatctaggttgcaccttttggggctactgctcatatatgtttgatatggcactaatgtgttaccgaactgttctctagaatgacagggcttcagtagtaggtgatgccattgaatacatagatgagctgaatcgaacagtgaaggaactgaagatcctagtggaacagaagtggcatgggactaataggagaaagataagaaagttggatgaagaggccgctgctgatggtgaaagctcatcgatgaggccaataagggatgagcaagacaatcagcttgatggggccataagaagctcatgggttcagaggaggtccagggagtgccatgttgatgttcgcatagtggaaaatgaaataaacatcaagctcacagaaaagaagacgaccaactcctccctgcttcatgttgcaaaggttcttgatgaattccatcttgagatcatccatgtggttggagggattattggtgatcactacatattcatgtttaacactaaggtattgacagtattatttattttaagtagcatcaggaactcctttccccatattgccgattgtcattgacagtaatgttccatcatccacaataatgcaggtgtctgaaggttcctcaatttatgcttgtgcagtggcaaagaggatccttcaagcagtggatgcacaacaccaggcacttgacatattcaactaggcattagcacccatagtaactatttgaagaagttcctagtctactactctccctggggagagtcgtaattttattttctgtcagtctatccgtgaggaaagttattagaacaggcttggagagaactttgtctttaccattagctagctcggaaaacaaaacaaaatctggcatgcctaactgtttactgttatcacttatctagctctaccagaaatgatttgactctctgcctcagtatttgcttccatcatcttttcgtctcatttcatttggagttggcttcaaaatatagtactccctccgatccatattaatcgtcgctgatttagtataatgttgtactaaatcagtgacaattaaatatggatcggagggagtagaagatgatgatttacacatgtctgcatggcctactatgttctcttttacagaaagtggcttagtgagttgcattcactggtaccagtatcacatctcataggatgctacatgcatatgaaaacttcgcagatatccaaaatctgtgcagaacttctacaagctgggccgaatcgctaggtaaatcgagttgcattgtgcgtgataattcgtgtgtagaggaatatgccacccaatagttctcaaaaccattgtcttagcaacgagatgagaaaaaggtatgacggtacggtcttacattcttgctatccgtgcagcagatctgctctgctcgactcgtacaatgtcccgaacacctcgcgggcaccaccccgcccccgcaacggcaaagctccggtcacggccaacacgcgaattgcagtgacgcaggaacagcacgagatgtgatgccgcccgtggcactctgcgccagaccagaatcagatcaggggactgaacatttccaacctgcaatcgtattcttgcaaagaacaacattttaccggtgagatctgcagggcccgggcgtgcgtccgctgcttgcttccgcgcagctcccgcaccgtcgatgctgctcgtggaaccgctgctcgcgtgcagacgtgctagggcaccaaaggctctccagctacgggagggcacgcctgtggttcaggtcgccgaggaagggggagaggaggattgcacgagcacttaccaggtggcaaaagaaaagaaacctgttagccgcaaatttcgtccctatcagcggacacggatcagtccgcgaacacggaaggccgcatacattttggtaacgataaaaactacctggaggaaattcgatcaaatatgaatttaatttaaacatgacggttttgttacatttacatcaactaagcgtagattgtcagttcctcatgtccgatcatgaacaagagaactgaagcttcaccgtctccacttccgcttcggtgctctccagctccgcctccgtaac

SEQ ID NO: 46 - DNA, 6114 bp, Triticum aestivum
  modified_base (419)..(419): a, c, t, g, unknown or other
  modified_base (748)..(1226): a, c, t, g, unknown or other
  modified_base (2465)..(2470): a, c, t, g, unknown or other
caaatataacccaggtgaaaatgcaaaacatgaagatttagtgtttgaataccacttatccataaattatacgaacgtacaacagaatctgaaggtatgatgccaccgcattagtgacatcataggagataacaatcaatcctaacaaatcctataccaccataacagccagatacactaacagacatgccatttttatcatgctcatccctcatttttaccatggaagccattttcttggtacgacaacttatggagagatatagggagcataagaaggacttgcatatggtgttcattgacttggagaaggcctatgataagataccgcggaatgtcatgtggtgggccttggagaaacacaaagtcccagcaaagtacattaccctcatcaaggacatgtacaataatgttgtganaaacacaaagtcccagcaaagtacattaccctcatcaaggacatgtacaataatgttgtgacaagtgttcgaacaagtgatgtcgacaccgatgacttcccgattaagataggactgcatcaggggtccgctttgagcccttatctttttgcattggtgatggatgaggtcacaaggggtatacaaggagatatcccatggtgtatgctctttgcggatgatgtggtgctagttgacgatagtcggacgggggtaaataggaagttagagttatggagacagaccttggaatcgaaagggtttaggcttagtagaactaaaaccgagtnnnnnnnnnnnnnnnnnnnnnnnnnnnnnnnnnnnnnnnnnnnnnnnnnnnnnnnnnnnnnnnnnnnnnnnnnnnnnnnnnnnnnnnnnnnnnnnnnnnnnnnnnnnnnnnnnnnnnnnnnnnnnnnnnnnnnnnnnnnnnnnnnnnnnnnnnnnnnnnnnnnnnnnnnnnnnnnnnnnnnnnnnnnnnnnnnnnnnnnnnnnnnnnnnnnnnnnnnnnnnnnnnnnnnnnnnnnnnnnnnnnnnnnnnnnnnnnnnnnnnnnnnnnnnnnnnnnnnnnnnnnnnnnnnnnnnnnnnnnnnnnnnnnnnnnnnnnnnnnnnnnnnnnnnnnnnnnnnnnnnnnnnnnnnnnnnnnnnnnnnnnnnnnnnnnnnnnnnnnnnnnnnnnnnnnnnnnnnnnnnnnnnnnnnnnnnnnnnnnnnnnnnnnnnnnnnnnnnnnnnnnnnnnnnnnnnnnnnnnnnnnnnnnnnnnnnnnnnnnatggacaggggtgcgtggaagcttgctatccatgtgccagagccatgagttggttgcgagatcttatgggtttcacctctagcctaccccaacttgtttgggactaaaggctttgttgttgttgttatccctcagtttcttgaagcggcgagcttactagaaaagcagatttaatgctacatatatattctggtggaagtttttctttaaatgtaactacacacttgatactcgataatctgtaccatgaaggtgaagatgtctaaatttttcatattttagtaaaccaagaacatcacaccaatatatacaaaaacatagatatagataatcaaaagaataaggctgatatgaatattccataatacaagatcatgtgctctttggatacttgcaatcttgtaggtagttgtagcacaccagtgcattcataaaatatggtaagggggcagaaggcatgacctacatttctcaacttcctatgggtgaataacatcaaagatgccaaattcaaagggtgtgagctttccgtctttctcgtgtctgtctcctaataataacagaaacaataataaccatatgatagtcctttgcattgacctttagtatgggcgcattctgttattttctgtcccatcatttttgtgtgacaaccaaattagggtttcatgacttaccgctataatattcttggcatagcacaggaactaggcttcatgggtcttcgagttgcagcttcatgaacaaagcctcgctcattcaatcatcagctgtaccaaaaagataggtatgttcacctctagtgcttattgctactgttcgctagatgtaattcctgattaacagttgcttctttaagtcttagttggtgagattaaacatcaaaagattcagccaccatggatttcatgtgcttcattttactgatcatcttgcacttactgagttgtattaccattacaaattattctgtgctactaaacattttgctgattgcctactgagcatgtggtagttgaagcacattgtatcaaacatcaatatgaataggattagggaacagaaaaagatggtaaggggtttgttaggtctggaacaagcaaagttgcttcatgtcttattaatcatcctatatgggacttctctacacggaagaacagacagccacattgcatagcttaaaactccacggctctacctcttttgcaacaaccaaaacagccaggccaactgcaattnnnnnncatgattcttctctggctcctaaatgcaacgacaacacaaatattgagctacagagattcaaggtgcagtcgttttctgcagatatcctttctgattcgaccaatctttcttctgaagctgcaagagcgatcaaccacctccagcatcaactaggaattggtttggagcaggatatgccgccagtgggaactgcgacctgggatacttctatctgcaccattcaagaccaaattatcaaccatcagcttagcgaagatccacaaaacatattggtgcaacaacagattcaacagtatgatgctgcgctttatccaaacagtggttacacaccagcacctgatctcttaaaccttctccactgcactgtggctccagtgttccctgcaacagcatcagtctttggtgatacagcactaagtggtgataccaactatttggatcttaatggtgagtttacaggagtggcagcaattcctgacagtggattaatgtacactagtgatccagcattgcagttagggtaccatgctgcccagtctcacgcactaaaggatatctgccattcactgccgcaaaattatgggctcttccccagtgaggatgaaagagatgtcatgcttggggttggaagtgtcggaggagatctttttcaggatatagatgacaggcaatttgatactgtactggagggcagaagaggaaagggtgagttcggaaaaggaaaaggaaaagctaactttgcgactgagagagagaggagggaacaactcaatgtgaagtataagacgttaagaatgctcttccccaaccctaccaaggtttgtcttgttcatcattttgcacatttaggagagttaatgattatagatgtccagaatagtcaactatagaagctaatcactagggtttgttcaatgatgctacatgtacagaatacttcattaatagaagctaacaattaaaatttcaggccactttccagttttcgttggttttgtaaatataattgaatttctgaataacttcacccatttattctcggtgtgttaagacgctcagaagtggcaacaccaaagtactatgcagtccaataaacctgtgcttcataaaacatcaacaaaaactcattcgcaaaactgtcatctgtctgatgtagattcaaagaaacatgtgttagataatatgcttctgctgaactttctgtcgaatagttcttcaagctctgttgccacattatattcaggctgatactgatatcctatggaacatgattgacatgaaatagttgctcgtcgtgctgctctttgcagatacttttagtggcatactatttaccccatttatcttgatcgagcgtgttagtaccttctaattaattatgaaagaaaatgaaagcaatcaatatttcatatgtatattgattttttttcataagacagtattattgtcctcattgcactactctccagcaaagtattgacctctatagtgatctaaccttaaccgattaaacaacacttcctgatttactcaatgaaaacataaacaatgtgacagaaccataaaaatctaggttgcaccttttgggggtactgctcatatatgtttgatatggcactaatgtattacagaactgttctctagaatgacagggcttcagtagtaggtgatgccattgaatacatagatgagctgaatcgaacagtgaaggaactgaagatcctagtggaacagaagtggcatgggactaataggagaaagataagaaagttggatgaagaggcggctgctgatggtgaaagctcatcgatgaggccaatgagggatgagcaagacaatcagcttgatggggccataagaagctcatgggttcagaggaggtccagggagtgccatgttgatgttcgcatagtggaaaatgaaataaacatcaagctcacagaaaagaagaagaccaactcctccctgcttcatgttgcaaaggttcttgatgaattccatcttgagatcatccatgtagttggagggattattggtgatcactacatattcatgtttaacactaaggtattgatagtattatttattttaagtagcatcaggaactcctttcccgatattgctgattgtcattgacagtaatattccatcatccacaataatgcaggtgactgaaggttcctcagtttatgcttgtgcagtggcaaagaggatccttcaagcagtggatgcacaacaccaggcacttgacatattcaactaggcattagcaaccatagtaactatttgaagaagtgcctagtttactactctccctggagagagtcgtaattttcttttctgttagttctgtccgtgaggaaagttattagaccaatattggagagaactttgcctttaccattagctagctcagaaaatcaaaaaaatctggcatgccttaactgttcactgttatcacttatctagctttactagaaatgatttgactctttgcctcagtatttgtttccatcatcttttcatctcatttcatttggagttggcttcaaaatatagtaaatcagcgacaattaatatggatcggagggagtagaagatgatgatttacacatgtctgcatggcctactatgttctcttttacagaaagtggcttagtgcgttgcattcactggcatcagtatcacatctcataggatactactacatgcatatgaaaacttcgcagagatccaaaatctttgcagaacttttacaagctgggccgctaggtaaatcgagttgcattgcgcgtgataattcgtgcatagaggaatatgccgcccaatagttgtcaaaaccattgtcttagctacaagatgagaaaaacgtacaacggtatggtcttacattctttagtcccatgccatcacagagttaggccacgagcaacacacacgcaacaatgcgaatgtatgacaatccaacgctgcggggaaggagagatggcaatagatcagcatccttacctcgcaccaatgcccctgcgtccgtgccaatgcagcagatctgctctgctcgactcgtgcaatgccccgaacacctcgcgagcaccgtcccgcccccgcaacggcaaagagccacaagcgaattgcagccacgcaggaacggcacgagatgtgatgccgtccgtggcactctgcgccagaccagaatcagatcaggggactgaacatttccaacctgcaatcatattcttgcaaacaacaacattttaccggtgagatctgcaggacccgggcgtgcgcccgctgcttgcttaggcagctcccgcaccgtcgatgctgctcgtggaacggctgctcgcgtgcagacgtgctagggcaccagaggctctcgagctacgggagggcacgcctgtggttcagcgaggaaggggaagaggaggagtgcaggagcacttaccaggtggcaaaagaaaagaaacctgttagccgcaagcttcgtccccatccgtccgcggacacgggatcagtccgcgaatacagatgcacaaaaccgccatccaacgctgactatatgcattttaacaacgactcaaattaaccgaacgaaattcgatcgaacacgattgaatttcatataaatacgatcggatttcat

SEQ ID NO: 47 - DNA, 5088 bp, Triticum aestivum
  modified_base (1015)..(1338): a, c, t, g, unknown or other
gacgctcgcgccgacccaaacacagcgccggacgtttgtgtccgccgggccgacccaaacggacaaaagcgccgtccgtttgggtcggcccgttggagttgctctaaggtaaaaagtctaaacttatcatattttagcaaaccaagaacatcacaccaatatatacagaaacacagatcctcaaaagaataaggctgatatgaatattccataatacaagatcatgtattctttggatacttgcaatcttgtaggtagttgtagctctactttctgagagaataactacaccagtgcattcataaaatatggtaagggggcagaaggcatgacctacatttctcaacttcctatgggtgaataacatcaaagatgccaaattcaaagggtgtgagctttccgtctttctcgtgtctgtctcctaataataacagaaacaataataaccatatgatagtcctttgcattgacctttagtatgggcgcattctgttattttctgtcccatcatttttgtgtgacaaccaaattatggtttcatgacttaccgctataatattcttggcatagcacaggaactaggcttcatgggtcttcgagttgcagcttcatgaacaaagcctcgctcattcaatcatcagctgtaccaaaaagataggtatgttcacctctagtgtttattgctaatgttcgctagatgtaattcctgattttgcttctttaagtcttagttggtgagattaaacatcaaaagattcagccaccatggatttcatgtgcttcattttactgatcatcttgcacttactgagttgattaccattacaaattattccgtgctactaaacattttgctgattggctactgagcatgtggtagttgaagcacattgtatcaaacatcaaatatgaataggattagggaacagaaaaagatggtaaggggtttgttaggtctggaacaagcaaagttgcttcatgtcttattaatcatcctatatgggacttctctacnnnnnnnnnnnnnnnnnnnnnnnnnnnnnnnnnnnnnnnnnnnnnnnnnnnnnnnnnnnnnnnnnnnnnnnnnnnnnnnnnnnnnnnnnnnnnnnnnnnnnnnnnnnnnnnnnnnnnnnnnnnnnnnnnnnnnnnnnnnnnnnnnnnnnnnnnnnnnnnnnnnnnnnnnnnnnnnnnnnnnnnnnnnnnnnnnnnnnnnnnnnnnnnnnnnnnnnnnnnnnnnnnnnnnnnnnnnnnnnnnnnnnnnnnnnnnnnnnnnnnnnnnnnnnnnnnnnnnnnnnnnnnnnnnnnnnnnnnnnnnnnnnnnnnnnnnnnnnnnnnnnnctggctcctaaatgcaacgacaacacaaatattgagctacagagattcaaggtgcagtcgttttctgcagatatcctttctgattcgaccaatctttcttctgaagctgcaagagcaatcaaccacctccagcatcaactaggaattggtttggagcaggatatgccaccagtggaaactgcgacctgggatacttctatctgcaccattcaagaccaaataatcaaccatcagcttagcgaagatccacaaaacatattggtgcaacaacagattcaacagtatgatgctgcgctttatccaaacagtggttacacaccagcacctgatctcttaaaccttctccactgcactgtggctccagtgttccctgcaacagcatcagtctttggtgatacagcactaagtggtggtaccaactatttggatcttaatggtgagtttacaggagtggcagcaattcctgacagcggattaatgtacactagtgatccggcattgcagttagggtaccatgctgccccgtctcacgcactaaaggatatctgccattcactgccgcaaaattatggactgttccccagtgaggatgaaagagatgtcatgcttggggttggaagtgtcggaggagatctttttcaggatatggatgacaggcaatttgaaactgtactggagggcagaagagggaagggtgagttcggaaagggaaaaggaaaagctaactttgcgactgagagagagaggagggaacagctaaatgtgaagtataagactttaagaatgctcttccccaatcctaccaaggtttgtcttcttcatcattttgcaaatttagatgatttaatgattgttggatgtccagaatagtcaactatagaagctaaccactagggtatcttcaatgatgctagatgtacgtaatacttaattaatagaagctaacaattcaaatttcaggccactttacagttttcattgttttgtgaagataattgaatttctgaataacttcatccatttattctcacttctcagtatgttaagacactcagaagtggcaacaccaaagtactatgcagtccaataaacccatgctttataaaacatcaacaaaaacccattcgcaaaactgtcatctgtctgatgtagattcaaagaaacatgtgttagataatatgcttctgatgaactttctgtcgaatagtccttcaagctctgttgctacattatattcaggctgatactgatatccaatggaacacaattgctatgaaatagttgctcattgtgctgctctatagtgacatactattaccccatttatcttgatcgagtctgttagtaccttctagttaattatgaaagaaaatgaaaacaaccaatatttcatatgtatattaattttttcataagacagtattattgtcttctgcactactctccagcaaagtattgacctctctggtgatctaaccttaaccgattagacaacacttcctgatttactcaacgaaaacgtaaacaatgtgacagaaccacaaaaatcttggttgcaccttttggggtactgctcatctatgtttgatattgcactaatgtgttacagaactgttctctagaatgacagggcttcagtagtaggtgatgccattgaatacatagatgagctgaatcgaacagtgaaggaactgaagatcctagtggaacagaagtggcatgggactaataggagaaggacaagaaagttggatgaagaggcggctgctgatggtgaaagctcatcgatgaggccaatgagggatgagcaagacaatcagcttgatggggccataagaagctcatgggttcagaggaggtccagggagtgccatgttgatgttcgcatagtggaaaatgaaataaacatcaagctcacagaaaagaagaaggccaactcctccctgcttcatgttgcaaaggttcttgacgaattccatcttgagatcatccatgtggttggagggattattggtgatcactacatattcatgtttaacactaaggtattgatagtattatttattttaagtagcatcaggaactcctttccacatattgccgattgtcattgacagtaatgttccatcatccacaataatgcaggtgactgaaggttcctcagtttatgcttgtgcagtggcaaagaggatccttcaggcagtggatgcacaacaccaggcacttgacatattcaactaggcattagcaaccatagtaactatttgaagaagtccctagtctactactctccctggggagagtcgtaattttattttctgtcagttctgtccgtgaggaaagttatcagaccaggcttggagagaactttgtctttaccattagctagctcggaaaacaaagaaaatctggcatgtcttaactgtttacggatatcacttatctagctttactagaaatgatttgactctttgcctcagtatttgcttccatcatcttttcgtctcatttcgtttggagttgacttcaaaatatagtaccaagatgatgatttacacatgtctgcatggcccactatgtactcttttacagaaagtggcttagtgtgttgcattcactggtatcggtatcacatctcataggatattacatgcatatgaaaacttcgcagagatccaaaatcagtgcagaactttcacaggctgggccgaatcgctaggtaaatcgagtcgcattgcgcgtgataatccgtgcgtagtggaatatgccacccaatactccaatagttgtcaaaacaattgtcttagctacaagatgagaaaaaggcatgacggtacggtcttacattcttagtcccatgccatcacagagttgggacacgagcaacacacacccaacaatgcgaatgtatgacaaatccaacgctgcggggaagcagagatggcaatagatcagcatccttacctcgcgccaatgcccctccgtccgtgccaatgcggcagatctgctctgctcgactcgtgcaatgccccgaacacctcgcgggcaccaccccgtccccgcaacggcaaagccccggtcacggcccacaagcgaattgcagtcacgcaggaacggcacgagatgtgatgccgtccgtggcactctgcgccagaccagaatcagatcaggggactgaacatttccaaactgcaatcatattcttgcaaacaacaacattttaccggtgagatctgcaggacccgggcgtgcgtccgctgcttgcttcggcagctcccgcaccgtcgatgctgctcgtggaacggctgctcgcctgcatacagtgctagggcactagaggctctcgagctacgggagggcacgcctgtggttcaggtcgccgaggaaggggaagaggaggagtgcacgagcacttaccaggtggcaaaagaaaataaacctgctagagcatctccaatggcaatccgtaaattttgtcccgcacctgtctgcggatagaggatcagtccgccatcacggatgcaggaggccgtcatccaacgctagccgcatacattttggcaacgactcaaactaatcggacgaaattcgattaaacacgaccggatttcattacatttacatcaactaagcgtagctcatccggctaggtctaaatggtcggcgacgcccgttccccgtgtccgcacatgaaccaagagaactcaagtttcaccgtctctagttctgcctcagtgctctccagctccg

SEQ ID NO: 48 - DNA, 900 bp, Triticum aestivum
aactgcgacctgggatacttctatctgcaccattcaagaccaaataatcaaccatcagcttagcgaagatccacaaaacatattggtgcaacaacagattcaacagtatgatgctgcgctttatccaaacagtggttacacaccagcacctgatctcttaaaccttctccactgcactgtggctccagtgttccctccaacagcatcagtttttggtgatacagcactaagtggtggtaccaactatttggatcttaatgatgagtttacaggagtggcagcaattcctgacagtggattaatgtacactagtgatccggcattgcagttagggtaccatgctgcccagtctcacgcactaaaggatatctgccattcactgccgcaaaattatgggctgttccccagtgaggatgaaagagatgccatccttggggttggaagtgtcggaggccgctcgtcggcggctcccacggctgggactactgcatctactggcggctctctcctgaccagaggttcttggagatggcggggttttgctgcagcgccgagttcgaggcgcaggtggccacgctcgccgacgtgccttgctccatccctcttgactcctcctccgtcgggatgcacgctcaggcgctactgtcgaaccagccaatctggcagagcagtggcgggtcgccgggcccggatctcctcacgggctacgaggctgcctccagcggcggcgagaagacgcggctcctcgtccccgtcgccggcgggatcgtcgagctcttcgcgtcgagatatatggcggaggagcagcagatggctgagctggtcatggcgcagtgcggtggcggtgggcaggggtggcaggagacggaggcgcaggggttcgcgtgggacgcggcggcg

SEQ ID NO: 49 - DNA, 450 bp, Triticum aestivum
aactgcgacctgggatacttctatctgcaccattcaagaccaaataatcaaccatcagcttagcgaagatccacaaaacatattggtgcaacaacagattcaacagtatgatgctgcgctttatccaaacagtggttacacaccagcacctgatctcttaaaccttctccactgcactgtggctccagtgttccctccaacagcatcagtttttggtgatacagcactaagtggtggtaccaactatttggatcttaatgatgagtttacaggagtggcagcaattcctgacagtggattaatgtacactagtgatccggcattgcagttagggtaccatgctgcccagtctcacgcactaaaggatatctgccattcactgccgcaaaattatgggctgttccccagtgaggatgaaagagatgccatccttggggttggaagtgtcgg

SEQ ID NO: 50 - DNA, 450 bp, Triticum aestivum
aggccgctcgtcggcggctcccacggctgggactactgcatctactggcggctctctcctgaccagaggttcttggagatggcggggttttgctgcagcgccgagttcgaggcgcaggtggccacgctcgccgacgtgccttgctccatccctcttgactcctcctccgtcgggatgcacgctcaggcgctactgtcgaaccagccaatctggcagagcagtggcgggtcgccgggcccggatctcctcacgggctacgaggctgcctccagcggcggcgagaagacgcggctcctcgtccccgtcgccggcgggatcgtcgagctcttcgcgtcgagatatatggcggaggagcagcagatggctgagctggtcatggcgcagtgcggtggcggtgggcaggggtggcaggagacggaggcgcaggggttcgcgtgggacgcggcggcg

SEQ ID NO: 51 - DNA, 23 bp, Triticum aestivum
ggtgagtgagtgtgtgcgtgtgg

SEQ ID NO: 52 - DNA, 23 bp, Triticum aestivum
ccacacgcacacactcactcacc

SEQ ID NO: 53 - RNA, 20 nt, Artificial Sequence
  Description of Artificial Sequence: Synthetic oligonucleotide
ggugagugagugugugcgug

SEQ ID NO: 54 - DNA, 450 bp, Triticum aestivum
aggccgctcgtcggcggctcccacggctgggactactgcatgtactggcggctctctcctgaccagaggttcttggagatggcgggtttttgctgcagcgccgagttcgaggcgcaggtggccacgctcgccgacgtcccttgctccatccctcttgactcctcctccatcgggatgcacgctcaggcgctactgtcgaaccagccaatctggcagagcagcggcggggcgccgggtccggatctcctcacgggctacgaggctgcctccagcggcggcgagaagacgcggctcctcgtccccgtcgccggcgggatcgtcgagctcttcgcgtcgagatatatggtcgaggagcagcagatggcggagctggtcatggcgcagtgcggtggcggtgggcaggggtggcaggagacggaggcgcaggggttcgcgtgggacgcggcggcg

SEQ ID NO: 55 - DNA, 450 bp, Triticum aestivum; identical to SEQ ID NO: 50

SEQ ID NO: 56 - DNA, 450 bp, Triticum aestivum
aggccgctcgtcggcggcgcccacggctgggactactgcatctactggcggctctctcctgaccagcggttcttggagatgacggggttctgctgcagcgcggagttcgaggcgcaggtggccacgctcgccgacgtcccttcctccatccctctcgactcctcctccatcgggatgcacgctcaggccctgctgtcgaaccagccgatctggcagagcagcggcggggcgccgggtccggatctactcacgggctacgaggcttcctccagcggcggcgagaagacacggctcctcgtccccgtcgccggcggcatcgtcgagctcttcgcttcaagatacatggcggaggagcagcagatggcggagctggtcatggcgcagtgcggcggcggtgggcagggatggcaggagacggaggcgcaggggtttgcgtgggacgcggcagcg

SEQ ID NO: 57 - DNA, 450 bp, Triticum aestivum; identical to SEQ ID NO: 49

SEQ ID NO: 58 - DNA, 450 bp, Triticum aestivum
aactgcgacctgggatacttctatctgcaccattcaagaccaaattatcaaccatcagcttagcgaagatccacaaaacatattggtgcaacaacagattcaacagtatgatgctgcgctttatccaaacagtggttacacaccagcacctgatctcttaaaccttctccactgcactgtggctccagtgttccctgcaacagcatcagtctttggtgatacagcactaagtggtgataccaactatttggatcttaatggtgagtttacaggagtggcagcaattcctgacagtggattaatgtacactagtgatccagcattgcagttagggtaccatgctgcccagtctcacgcactaaaggatatctgccattcactgccgcaaaattatgggctcttccccagtgaggatgaaagagatgtcatgcttggggttggaagtgtcgg

SEQ ID NO: 59 - DNA, 450 bp, Triticum aestivum
aactgcgacctgggatacttctatctgcaccattcaagaccaaataatcaaccatcagcttagcgaagatccacaaaacatattggtgcaacaacagattcaacagtatgatgctgcgctttatccaaacagtggttacacaccagcacctgatctcttaaaccttctccactgcactgtggctccagtgttccctgcaacagcatcagtctttggtgatacagcactaagtggtggtaccaactatttggatcttaatggtgagtttacaggagtggcagcaattcctgacagcggattaatgtacactagtgatccggcattgcagttagggtaccatgctgccccgtctcacgcactaaaggatatctgccattcactgccgcaaaattatggactgttccccagtgaggatgaaagagatgtcatgcttggggttggaagtgtcgg

SEQ ID NO: 60 - protein, 250 aa, Triticum aestivum
MNSTLFIIGIIGNIISVLVFVSPIPTFWRIVRSRSTEDFEAAPYVLTLLNTLLWLYYGFTKPDGLLIATVNGFGAVMETIYIVLFLVYAADHAKRVKTTKLVAALDIGFFGVVFATTTFAIRGLDMKIVVIGLICACLSVFMYGSPLAAVRRVIASRSVEYMPFFLSFFLFLNGGVWAMYAILDKDVFLGVPNGIGCFLGGIQLVIYAVYRNSKVGCQSQGTHEASYDASTSLLSSYADTHGQNDVSTHV

SEQ ID NO: 61 - DNA, 753 bp, Triticum aestivum
atgaactccactctgttcatcatcggcatcataggaaacatcatctcggttctggtctttgtttctcccatccccacattctggaggatcgtgaggagcaggtcgacggaggacttcgaggcggcgccgtacgtcctcacgttgctcaacacattgctatggctatactacggcttcaccaagcctgacggcctgctcatcgccacagtcaatggcttcggcgctgtcatggagaccatctacatcgtcctcttccttgtctacgcggccgatcatgccaaaagggttaaaaccacaaagttggtggcagctttggacattggattttttggggtcgtgttcgcgaccacaacattcgccattcgtgggcttgacatgaaaatcgtggtcattggattgatatgtgcttgccttagcgtgttcatgtatgggtccccactcgctgccgtgagaagggtgatcgcctcgaggagcgtggagtacatgcccttcttcctctccttcttcctcttcctcaacggaggcgtctgggccatgtatgccatactcgacaaagatgtcttcctcggggtcccaaatgggataggttgcttcttgggaggtatccagctggttatctacgcggtgtataggaacagtaaggtcggctgtcagtctcagggcactcacgaagcatcatacgatgcttcgacatctcttctgtcctcctatgccgacacacatggccagaacgatgtatccactcatgtttag

SEQ ID NO: 62 - DNA, 6512 bp, Triticum aestivum
tttgctcatttgtttggaccaaagtctcttagcgcaagaccttttgaaaacgctatagcgtgctatagcgggctatttaaaatagaggattgcacacatgcgccaatggactaatctccacaccggcccacggcaagacaaccttttcctggctaaagggataacatgtgtcctctgcatctatcgatgcacacagccttaccgtaagacaatcctgcatgcatgtgttgatcacgtcatggtgacactctaccgctgagttatatctcttcgccgtcccatacgaatcctaacgcaaaggggcgagaatatttgctgattaaataaacaattcaggaaatgttctcaagaaagaatgaaaaggaaccaaggactgactgcaagtacatcaagtatagtagataaagaataagaaatcaaatggggattcatgaaactaattgcaaagatatacatctcaattatggtgtcctctaggggagaggaaggacagtgaagcgacggccggagttctgtttgagatcaaacgtctccactctcttcacaagagcatctcctcttgaagcatacctttccttcttaatatcttttgtaataacgggcttagtcagctgttcacactttggtttcctgctcaacccagttatggcttcatttcttgtaatcgtttgtacgaccttgtttggtctgaccttctttggctttattaatttaaagccagatgtctcttgcgccttttataaaaaaaaatagcacgcatgcatcaacctccacaccatctcatgataataaaacctttttgttcttcgaagggatgtgctgaaatgatttgccgattaaatgcacacaggcttattatcgtaagacgatcttgcgtgcatgtgctgaaatgatttgccgattaaataaaaaaattcaggaaatattctcaagaaagaataaaaaggaaccaaattaaggacgaccgcaagtacatcaagtagagtatagataaataaaatgaaatcaaatggggattcgtgatgataactgcaaagatatacatctcattacatatctgcaagaaaacaagggagaaataagcatgtcgatctctgccttttggtcaaccggatctgcatcaacatattatagtgatcttgtgttgcacgaggcagctatctcaggcccagcttcgaattaattcgtaaccgcctgtccctctcatccagcagtgcaggctcgatcgtgcagtgctttctccgcattaagtacgatggatgtcctcctagtttggagatcatcgtcctttaatttcgacctcctcattaagtttgacgcacctcttcttcatcctcccttccaccagctttctcggctggcagctgcgcgccatgaactccactctgttcatcatcggcatcataggtatgcacatgcatgcttgagtctctctctctctctctctctctctctctctctctctctctctctctctctctctctctctcacgcacccacccttactttgttctttgttcattgttgtttgaccataaagcctcctttgcattttgcaggaaacatcatctcggttctggtctttgtttctcccatgtaagagcatgcgatcatgcacgcatttacagaagcatgtattttgtttctgcttattctttttttttcgaaggaggatcgacctccggattttgtttatgttgttgcttgcatgcatggctgattgctgttgttgctttacaaacatggtgcagccccacattctggaggatcgtgaggagcaggtcgacggaggacttcgaggcggcgccgtacgtcctcacgttgctcaacacattgctatggctatactacggcttcaccaagcctgacggcctgctcatcgccacagtcaatggcttcggcgctgtcatggagaccatctacatcgtcctcttccttgtctacgcggccgatcatgccaaaagggtatgtgaggccacagggtctacgaatcgcaaaaaaaaaaaggccacacggtctacaaatataacccatttttatctttagacaacaatttactcctgaatttgtatgttcccctattgatggaactataggagtagcttgcccgatcacattaaggggagtagctcgtcttgaccgagttagttgtatgtttccccattaagggaacaagaagggtggtcaagtaatttcataccctaaactatttagagcatgcttggatccaagggactatttttagtctgactaaaaatagtctcttttagaggctaaagtcccaagcacacctgactaaagagaggctaggactagtcttgaggctaaaaaaatttagtcataggaaacctactaaaatatgtattagccctctctctcctcatttaatttctctccttgaacacatgcgagttttggattggagggtttgaaggataataaatgctcaataacttgattttagtctctttagtatttggatccgagcatgggtgaggctagcaagttttagtcccactacttttagtcatgggactaaaacgtatccaaacaccctcttaattagtggctatctttagacgcaacatatctatcatattaattgtttctattgagttgcattctttccctttggacccacttatcttgtgttcctatttcagctgccttaattaatgtggttattttcgacattttcctgagttactctaagggggtgtttggttccagggactttttttgttgggactagaaaaggtccctaccaaaccaaacagggtgggacttttttgggactttttgctaaaagtccttagaagcacctccttgagagtctttttcaaaaagtcctagggactagaaaaagtcctagggctagagaaccaaacaccacctaagagtagcttcattgtcatatttcttttttggcaattttatgatatagttcgactgtgaaaatgtcataataattttactatatattatatgtatggatgatcgcatggcaagcgcaatcagccatctaaaagtgtccaatcaataatatcatgtcaacttttgcaggttaaaaccacaaagttggtggcagctttggacattggattttttggggtcgtgttcgcgaccacaacattcgccattcgtgggcttgacatgaaaatcgtggtcattggattgatatgtgcttgccttagcgtgttcatgtatgggtccccactcgctgccgtggtaaggccattacaccaagacccaacaaataaatcagtcatcatatttttcgtggctatttttatttcttttcttaatctgatgattgacacaagagagatagtgtgtgtgggtaattgcgctatgctgacattaatttttggcccatacatatataatgatttttaatagttaaatcctagcaaataactcactttgcaacaatactaagagcaaaactgttcaatttaaacgagtgttggacgcacttttctctaaatataaccaacaccctaaaacatcttctttgaagttgtatagtactccaaaagttacattattcgaatcatctttcaaatacttttggtggcatatgacctgtattttgttagtaaaatctgtgttcatacttatgctccataagactataatacagtacataatatagaacaaataatattcataaaagattgatccttatttttatccagttagatcttagttcgaggtgggaaagcactaccagatcatctctaaccatacacatacatacatacacatcgtgagacagccattcagttgggatacgtacgcaaggtttcggtcaagctatacagtttccattagctaacgctttcttgtacggcatgtgcacaccttgcgtacgtacctccagacaagagatatgctatacatatgtgtaggtcaacatctcaacatatatacacctgcatttaacaaacatagatgcagtaaatgtacacggatatgatggacatgccagtcgtcttgaaaacccatatatgtggaaacacgatatgcagaatatattcgttacattacattatacaaagcgtggatggcatgtcgaattttctatttatttttttggcggggagatctcatgtgggttgtttgattggacgcagaaccactatttttcagaggaaacagccaactaacacagtagctggctgatcgatcgatatcttcgtgatgtacttatagtatcaatatggggttataatattgtagtcctacatccttttgcttaattaagctcatagctacgtgctgatcactatctaaatcattccaaaacaagtcagagacacgttcttgcactgtcacgtgtgaatgaatgaatgcatgaggagtatacaggcctactactactgtagtcatcatgtcatgttaaattaggtgtgcgagtgggccaagatctcgattgagaaggcaggctggccggctgctgttttcgtgggcctgattgccacgccctttagttgctgctccgctaattggtttcatgttcctgaacaacgtgtgtaaatttgtggcgggaacagagaagggtgatcgcctcgaggagcgtggagtacatgcccttcttcctctccttcttcctcttcctcaacggaggcgtctgggccatgtatgccatactcgacaaagatgtcttcctcggggtaagtcttacacttattggggttaatgaaaatggaagagtgttagtgatctttaagtgggatgttaatgaaaatgcaggtcccaaatgggataggttgcttcttgggaggtatccagctggttatctacgcggtgtataggaacagtaaggtcggctgtcagtctcagggcactcacgaagcatcatacgatgcttcgacatctcttctgtcctcctatgccgacacacatggccagaacgatgtatccactcatgtttagtgatttcgaacgatgtgccgaaatattactactatagtgattgtgtaaaattatgtaatttttcgtagagtgaagtccaatttttacctctacttgatatttgtaaagctagctaggtaagttttcatctgaataccctatttaacaaaagttttgcaagtttgtatcccaattaccgaaagttttccctgtttttgtctcattaaagtttatattttaagagtggtctgctatgtgggccttagcggtttggtatatggcgtgatagatagcggttttcctccttgtatattttccccgcgcatggatcgattcgcgtccataagctaagttgtactcattccaaacacccacatgcaactatttagcggaaccaattgaacgatgcagtgcgtttgtacagctgacgaccattagaaaaaatcatgtctgactaagctattcggcttgttcgtgtgaagaacattgttgtataaaaaacgatggcatgacatgtcacgcgtacatggcaacaggacacatggttgctctcaaaacattataaaggatataactggtaaaactttccttaaatgaggtaattcggatgataccaaattagcataaaaatgtcaaagtagagggtaaaaatcagaatcactctttttctttcatatgatcatgcataaattttttgaacatctttactaatgcaacaaataatgtacataaagatgtacattgcaacatctttttaaaaaaaccagaatacttctctattccattaaccagaacaaccagctaaatcgttggtaaccagactacaagcgaagtccgggaccccatccgcccatacagttgaggacgcaagctctaggctagcaccaaatgtgctaaagaatcagctactttattacaagcccgtgggcaacgcaaaatactaaaacgagcaaaattcaaactggcaaaacatttaatctccctgaaagttgcaccatgtgcagctcggtcatgtttcttaccctgaacagctcgcaataacagcaaggaattggtttccacttggatggtgttacattgcaacatctttagtactccctccatttttatatacaaggccactatggaatatacattttgcatctatacaaggccacgaacagtaatcgaggcaaagttaatgatattttctcgtactaacaacatgtttaatacttgcatgtatgcagtcataatgacagccaactacttcctccactcagtttctttgcatgcatgcgaagtattaatgatcccagtaaacaagaaaaaaagttgacttgtaaagcagacattaaattttacattggtacttgtaatctgagtttgtggccttgtatacaaaaatggagggagtaatgttaatttaaccacattgttttttttagaattgccaatactttattgatcaatgtggatgttcatgggaatacaagagaaattagccacaagtggccaccctgatcaagcaaagaggagtatttagccacattgtttttttaggagtatttagccacattgttgcatcttgctctttgcgagcaatacacatcgcg

SEQ ID NO: 63 - protein, 269 aa, Triticum aestivum
MHLFFILPSTGFLGWQLRAMNSTLFIIGVIGNIISVLVFVSPIPTFWRIVRSRSTEDFEAAPYVLTLLNTLLWLYYGLTKPDGLLIATVNGFGAVMETIYIALFLIYAVDNAKRVKTAKLVAVLDIGFFGVVFAATTFAIGGLDMKIMVIGLICACLSVFMYGSPLTAVRTVIASRSVEYMPFFLSFFLFLNGGVWATYAILDKDVFLGVPNGIGCFLGGIQLVIYAIYRNSKVGSQSHDSDEAAYDASASLLSSEAGRHGQNDVSARV

SEQ ID NO: 64 - DNA, 810 bp, Triticum aestivum
atgcacctcttcttcatcctcccttccaccgggtttcttggctggcagctgcgcgccatgaactccactctgttcatcatcggcgtcatagggaacatcatctcggttctggtcttcgtttctcccatcccgacattctggaggattgtgaggagcaggtcgacggaggacttcgaggcggcgccatacgtcctcaccttgctcaacacactgctatggctctactatggcctcaccaagcccgatggcctgctcatcgccactgtcaacggcttcggagctgtcatggagactatctacatcgcgcttttcctcatctacgccgtcgacaatgccaaaagggttaaaactgcgaagttggtggcagttttggacatcggttttttcggggttgtgttcgcggccacaacattcgccattggagggcttgacatgaaaatcatggttattggattgatatgtgcttgccttagcgtgttcatgtacgggtccccactcactgccgtgagaacggtgatcgcctcaaggagcgtggagtacatgcccttcttcctctcattcttcctcttcctcaatggaggagtctgggccacgtatgccatactcgacaaagatgtcttccttggggtccctaatggaataggctgcttcttgggcggcatccagctggttatctatgcaatatacaggaacagtaaggtcggctctcagtctcatgacagtgacgaagcagcatatgatgcttcggcttctcttctgtcctctgaggccggcagacatggccagaatgatgtatccgcccgtgtttag

SEQ ID NO: 65 - DNA, 6171 bp, Triticum aestivum
ggatcttggtggagatgcggcgacttgggcgaaggatctgcggtcgccccccgccttcccctcccaccagccaaacgacggggaagccctaggcaccgaaaccctaggcgcctcccagaagtggagaaggagtagatcgagatctggaatggactgaggtgggtgtggaggcggcggcgtgggatttatcccctccacaaccctaaccgcgtgccctgtagctgttgaccccacctggcccgggttcgccccacctcccggtcccgccatgccgcgtgtgtcaggcgcaggcccgagaagccctgggtccgcggtccgctgcggtacacgggacgcaccgagcggtacacgaacgcgccccacaaccatcgtctccggcgtgactgcatcagcgcatgtcgccgtcgatcggcggccatggccggcgtgaggggagggagaggggagggaggtcaggacagccatctccctgatttggtagtgagttgatactggacctccccctactgcgcgatcacctacatttgagctcacctacgtttccttcttaatatcttttgtaataatgggcttagtcagctgttcacactttggtttccagctcaatccagtcatggcttcattacttgtgatcgtttgtacgacatgtttggtcttaccttctttggttttattaattaaaagctggatgtctcttgcgtcttttatcaaaaaaaatagcacgcatacatcaacctccacgccatcgcatggtaagacaacctttttgttcttcgaaaggaggataacacggtgcctctgtatctataaatgcacacaagcttatgaccgtaagacgatcttgcgcgcatgtgctgaaatgatttgctgattaaataaacaattcaggaaatgctctcaagaaagaacaaaagggaaccagggacgaccgcaagtagatcaactacagtataaataaagaaaatgaaatcaaatggggattcatgatgataactacaaagatatacacatcattatatacctgcaagaaaacaaggcagaaataagcacgtcgatctctgccttttggtcaaccggatctgcaaggtaggccggtggcgttcgacacaacaacaacatattatactgttcttgtgttgcacgaggcagctagctcaggcccagcttcgaattaattcgtaaccgcctgtccctctcatccagcagcgcaggctccatcgtgaagtgctttctccgcattaagtacgatggatgtccttctagtttgcagatcatcgtcctttaacttcgacctcctcgttaagtttgatgcacctcttcttcatcctcccttccaccgggtttcttggctggcagctgcgcgccatgaactccactctgttcatcatcggcgtcataggtatgcgcatggatgctctcgtctctctctctctctctctctctctctctctctctatctatctctctctctctctctctctctctctctctctctcacacacacacacacacacacacacacacacacatttatctttctttgttctttctttctttgttgtttgaccatggagcttctttgggttttgcagggaacatcatctcggttctggtcttcgtttctcccatgtaagagctacgatcatgcatgcatttgcagaagcatttaattcgtttttgttttttccgtcttttctcgaggaggatcaacccccggattttgtttctggtgttgcttacatgcatggttgattgttgttagtgcttacataaatggtgcagcccgacattctggaggattgtgaggagcaggtcgacggaggacttcgaggcggcgccatacgtcctcaccttgctcaacacactgctatggctctactatggcctcaccaagcccgatggcctgctcatcgccactgtcaacggcttcggagctgtcatggagactatctacatcgcgcttttcctcatctacgccgtcgacaatgccaaaagggtacgtgaggccacacggtgcagtctacaaataaaacccatttgtatctctagacagcaatttactcctgaatttgtgcaactggaggcaagagtacattttcccattgagagaactatacgagtagctccccattaaggggagtcgtagctcgtcttgaccgagttagttatatgtttcccattaagggaacaagaatggtgctcaagtaatttcatacactaaactatttaattactggctatctttactcgcaacatatctttcatattgattgtttctgttgagtcgcattctttccctttaattcataccacttatttggtgtcctatttcagttgcgttaatgtggttattatttgaccatttctactctaaaagtacttcattatatatatttttggcaattttatgatatagttcggctctggaaacagcatacagttattactatatatttacatgtatatggaagatcatgtggcaagcgtaatcagacatctcaaatttttgaatcaatcatatcatgttgccctttacaggttaaaactgcgaagttggtggcagttttggacatcggttttttcggggttgtgttcgcggccacaacattcgccattggagggcttgacatgaaaatcatggttattggattgatatgtgcttgccttagcgtgttcatgtacgggtccccactcactgccgtggtaaggccattacaccaattggtcatctgtttgcttaactttctaggttttatgtatattttgttacggtgattttttttagaaatcttttatgcttctttttgttgtttcgacaatgtaactgacaaagagaggtctcgagatagggtgtgcgaaatagtgatacatagacaaattttttacgcccatacacgtaaatgaaaaacaattgtgataattgaatcctatcaaataactcgctttgtaagaatgctaggagtgaaacttttcaattttaaggagtatcgggcgcaatttttcctacatataacaaacatacatgaacatctgttttgaagttgtatagtactgcaaaagctataccactaaagacatctatccaatggcatatttccgtgttgtataacttatgtcttgttagtacaaaatttgtgatcaaagttacgcccacaatttgaggtggccttaattatatatattttgacggagggagggtagcaaaaagtaaaggtattgatgaccctcaataaactataatacagtacggaatatacaagaaataatatctattaaaatggcatccttgtttctatgcaattagatctttattatatgtggcaaagtactaccagatcatctttgatcatacagtacatgtatacatacacatcgtgaggcagccatttcgttgggatacgcaaggttccggtcaagttatatacagttcccactagctaacactttcttgtatggtatgtgtacaccttgcgtccagacaagagatatgctatacatatgcgttggtcaacttatacatctgcattttacaaatatatatagatctagtaaacttgcacggatatgatagacatgtaagtcgtcttgaaaaaaatatggcgtggacacacgatatgcagaatatatccgccacattacattatacaaagcatggatggcatgttgaattttgtattcctttttttgtgaggagatctcatttgagttgtttgattggacgccaaactgctattttcagaggaaacagccaactaacacactagccggctgatcgatcgatatcttggtgctgcagcgtatcgtatcattggggatatttgttaattagttggggttacaatattatattacactagtacacgtattgcttaattaagctcatagctacgtgctgatcactatctaaatcaattcagaacaagtcagaaacatgtacgttcttgcactgtcacgcgtgaatgaatgaatgaatgaatggacgaggagtatacaatactactgtactcatcatgttaattacgtgtgcgagttggctaagatcttgattgaaaaggcggactgttttcgtggccatggttattagttccacgtcgatttggatggatggagttggaacttcgtatgtgttacgttaattaatttcttgtttcaaaagaagtttaattaatttctcagaaccgtggtactgcacctgaaaatcttttgtcaatttgtggcgggaacagagaacggtgatcgcctcaaggagcgtggagtacatgcccttcttcctctcattcttcctcttcctcaatggaggagtctgggccacgtatgccatactcgacaaagatgtcttccttggggtaagataagaagcacttacttgtcttataggagtacttaatcaggttacagaaaatggcttcatgttttaatgatctttgtacttacgtgtctttacttgcatgcaggtccctaatggaataggctgcttcttgggcggcatccagctggttatctatgcaatatacaggaacagtaaggtcggctctcagtctcatgacagtgacgaagcagcatatgatgcttcggcttctcttctgtcctctgaggccggcagacatggccagaatgatgtatccgcccgtgtttagtgaatttggacgacgtgctaaaatatactgctgtagtgattgtgtaaaattatgtgatgttttgtagagtgaaatccattttttaccactctacttgatatttgtaaagctagctagctatccatttatcagttttcatcggattaccctgtttaacaaaagtttcgcaagtttgtatcccaattagcgaaagttttgtcagttttttgtcccatttaaaatttaaaatttaagagtgatcttctaggtggccctcagccgtttggtatatggcgtgacacattgcggttttccaccttgtatattttccccgtacatggatcgactcgcttccctaagctaagttgtgctcatcccaaacacccgcatgcaactgtttagcggaaccacaacgcagtgcgtatgtgcagctgacgaccgtgagaaaaaaattcatgtctgactatgctattaggcttgttcgtgtgaagaacatcgttgtatgaaaaacgatggcatgacatgtcacgcgtacataggaacaggacccatagttgctctcaaaacatttataaaggataaaactggtaaaactttccttaaatgaggtaattcggatgataccaaattaacgtaaaaatgcaaagtaaagggtaaaaattagaatcactctttttctttcgtatgatcatgcataaaaactgtgaacatctttactaatgcaaaaaataatgtacatatttctgataaagatgtactgtacattgcaacatctttactaatgttaatttagccacattgctgcatcttgctctttgtgagcaatacacgtcgcgggcctgcaatcctgtgggcctacgtcatacagtatgactcacctacgccatacagtagtactacagtaggcgggttttctatttttcttttgtgtccattttttctctataatactcgagtgcattttttttcatttctttcttttcctttttatttatgaaaaattaatttaactaagatgatttttaatctacatatgtattgtttcttccaaaaagatataaacctatttgttaaaaatgcatgaagacctttactgaaggtttactacaaaaatattcactgtatattaataatatgcccgttatgtttaggaaaactgttagtcacatattttggaaacattcatcgtgaactaaaataggttgagcctattaaaaaaaggtacattgtgtatttaaaaaacgtcatcacatattacaaaatgttcatctgtcttgaagatcactccattgtgttaaaaacagttcagtgtatactaaaaaagtgttcacctcgtactaaaaactgttgatcatgaattcaaaaaaacatttaatgtttaatccaaaaaaatgctcactttctatttagaaagattttttgtgcatttaaaaatattcatcacatttaaaaaaatgctgagtgtgtactaaaaaattcttatcattgtttcaaaaaggtttgatgtgcattttaaaatgtgcatagcatatttcagaaattctgcacgtattac

SEQ ID NO: 66 - protein, 269 aa, Triticum aestivum; identical to SEQ ID NO: 63

SEQ ID NO: 67 - DNA, 810 bp, Triticum aestivum; identical to SEQ ID NO: 64

SEQ ID NO: 68 - DNA, 6171 bp, Triticum aestivum; identical to SEQ ID NO: 65

SEQ ID NO: 69 - protein, 402 aa, Triticum aestivum
MAVEAPQQPEQAAGGSVEQGAAAGGGRLKKGPWTPDEDQLLVEHVRRHGEGSWNAVRRETGLLRCGKSCRLRWANHLRPNLKRGPFSPEEERLILRLHALIGNKWARISAHLPGRTDNEIKNYWNTRLKRRKRAGLALYPPDVEREVALVRAGKLRPIVDADGNASSLQAPLLLDAAADQFAWPAAPPFHPAFNNVAPPQPFQFTGNISHNPQALLAAQVPYLHHDEVSAGLGHANKLYADALGMPPLVPPSAQELPSNQSPADAGGPLEMLVLEQDQRLPGAALLRVTSMPELVYNENDYSAWPSGLSGGSGSRSEGDVTSHYGGKCDCFFDGVKPAKGMPASLAVAEEEVSGLFGGEELVAVWPDKPPESITKDDFNLQMMEMQHLMPPVPLPADEHGLN

SEQ ID NO: 70 - DNA, 1209 bp, Triticum aestivum
atggctgtggaggcgcctcagcagcctgaacaagcggcgggtggatccgtggagcagggtgcggcggcgggcggcggcaggctgaagaaggggccatggacgccggatgaggaccagctgctggtggagcacgtacggcggcacggcgaagggagctggaacgcggtgcggcgggagacggggctgctgcgctgcggcaagagttgccggctccggtgggccaaccaccttcgccccaacctcaagcggggccccttctcgccggaggaggagcgcctcatcctccgcctccacgcgctcatcggcaacaagtgggcgcgcatctccgcacacctgccggggaggacggacaatgagatcaagaactactggaacacgcggctgaagcggcggaagcgcgccggcctggccctgtacccgccggatgtcgagcgggaggtggcgctcgtccgcgccggcaagctgaggcccatcgtcgacgccgacggcaacgccagcagcctccaagcaccgctcctcctggacgcggccgcggaccagttcgcctggccggctgcgccgccgttccaccccgccttcaacaacgtcgctcctccgcagcctttccaattcaccggcaacattagccacaacccgcaggccctcctcgcagcgcaagtaccgtacctccaccacgacgaggtttccgccggcctcggccacgccaacaagctttacgccgacgcgctggggatgccaccgttggtgcccccctctgcgcaggagcttccttcgaaccaatcgcccgccgacgccggcgggccgctcgagatgctcgtcctcgagcaggaccagcggctgcccggcgccgccctgctccgcgttacgtccatgccggagctggtctacaacgagaacgactactccgcgtggccgtccggcctcagcggtggcagtggcagccgatccgaaggcgacgtgacctcgcattatggcgggaaatgcgactgcttcttcgatggcgtgaagcctgcgaaggggatgcccgcgagcttggcggtggcagaggaggaggtgtccggcctgttcggcggcgaagagttggtggccgtgtggccggacaagccgccggagtcgatcacgaaagacgacttcaacctccagatgatggagatgcagcacctcatgccccccgtgccgctcccggcagacgaacacggcttgaattaa

SEQ ID NO: 71 - DNA, 4450 bp, Triticum aestivum
ccgccggcctacatgacgcctaaaatgttgccatgccagcagccgccacctccatgccaccgtgttgcgggaagcacacccttccatggccttcggctccggcagtccggccgcttcattgctaaaatcaactatgatcggcagcagagatggctcggcacctttaccacacccgagctttgtcgcgtgtgcttacgacgtggtggcttggaagtatcaccgactccagctcaacttcccccatattacgtcgctcgaggacgcggagttcctcatccctggactatgaatcgtgtcacgcggtgaggggaaggaagatctcctggtggtggagcagcgcaccgcccatgagtgtgatgcagtggctatggtgagattcactaaggtgaatccacacctcgtggtagtggggcgcaaattctttgccaagagggtcgtgaggcgcaagaaggaggacgaggttggccctgacaggcaatcaagattgagtccgacaacaacaaagacgatgtcgaattcggtagtgatgaatcgttgctggagctttagaactgtgtggagtccaaggatggtgaccattagtgtgtctctagtgtgcgtgtagtagtgaatctatcgtagtattgctattttcatgtttattaagtttgaacatttcgtagttcaaaatatcaaaatatgtggtgatcttgtttaaagtttggaagttaattttagggcaatttctggtgacctaaaaccttctgtcctactctactttttttacaccaacttatacatcatctgtcttcccgcaaaaaaaaaaaaacttatacatcaactgtcggagatgctcttgtgggcagcaaaaacaatagagcagtgctacacacacgatgctgtgcgcacgattcatgcacgacaacagatccctgtccgtccatgcatgtagcagagtccagcagaccgtttgatcccgcatcgttcatctgtcgtgcatactgttgtcgtccgcgcagcagttccgaaaacaatatagtgtggatgccctactagcttctagatctcttcaacacacgggaggagatggattcacagaaggcatgcagggatgcatgcgccccttcatgcatggccgcatgcatcaagcatggactggaccgattaaataggaggaccatcaatctttcgtgccattattttcgcgttctccttctctcccccattttttcctctcctcttttttggcccgccacccctactagattgacaaaaaacaaaacaaatatttccctttgttctcataatcttcttctagtagctccggcgaattctgctcctctctagtagaggatgtgctcgatcgggacgctaggtttcagtttctagattgattaggaacatatacgtacaatgcgttgagcttttgatcttccattcattcatgtttttgtcttcgatggtttctgactcctccggcccggcgatgcgtgggaggtaggcgacgagatcatccgcctctctccccctcttctcgatctcgatcgcatgtaagctttgagaagaggaagaggaggagagaggaaaggtgaggcggatcatttcaccggtccgtcgatcgatcgatggctgtggaggcgcctcagcagcctgaacaagcggcgggtggatccgtggagcagggtgcggcggcgggcggcggcaggctgaagaaggggccatggacgccggatgaggaccagctgctggtggagcacgtacggcggcacggcgaagggagctggaacgcggtgcggcgggagacggggctgctgcgctgcggcaagagttgccggctccggtgggccaaccaccttcgccccaacctcaagcggggccccttctcgccggaggaggagcgcctcatcctccgcctccacgcgctcatcggcaacaagtgggcgcgcatctccgcacacgtgagtaccaccggtcgttcgatccctttaccccgcctcgccattagaatttcttgcctgccgttgcctatcgattgcctggtgcccgatctgcgtctgcatgcagctgccggggaggacggacaatgagatcaagaactactggaacacgcggctgaagcggcggaagcgcgccggcctggccctgtacccgccggatgtcgagcgggaggtggcgctcgtccgcgccggcaagctgaggcccatcgtcgacgccgacggcaacgccagcagcctccaagcaccgctcctcctggacgcggccgcggaccagttcgcctggccggctgcgccgccgttccaccccgccttcaacaacgtcgctcctccgcagcctttccaattcaccggcaacattagccacaacccgcaggccctcctcgcagcgcaagtaccgtacctccaccacgacgaggtttccgccggcctcggccacgccaacaagctttacgccgacgcgctggggatgccaccgttggtgcccccctctgcgcaggagcttccttcgaaccaatcgcccgccgacgccggcgggccgctcgagatgctcgtcctcgagcaggaccagcggctgcccggcgccgccctgctccgcgttacgtccatgccggagctggtctacaacgagaacgactactccgcgtggccgtccggcctcagcggtggcagtggcagccgatccgaaggcgacgtgacctcgcattatggcgggaaatgcgactgcttcttcggtgagttggatcttgaccatcgtctctctcccaatccaaatatgtcacgtccgactccggtgagttaacaatgccatgcatgatgtcgtcgacacacgcgcagatggcgtgaagcctgcgaaggggatgcccgcgagcttggcggtggcagaggaggaggtgtccggcctgttcggcggcgaagagttggtggccgtgtggccggacaagccgccggagtcgatcacgaaagacgacttcaacctccagatgatggagatgcagcacctcatgccccccgtgccgctcccggcagacgaacacggcttgaattaattagcacaacgccgcttcgcaaacaaaactggaacagttcaaaagaacaagggatttaaaagaaagaaaaaatagtgtactgctgtagtaaaaactcagttaaggcccatcatgaaaatgtttgtctttgtctttatgcaacgagagatggattatgtttgtaaaaattgattcgcggaagcaagccaaggaacatggtccgtccatccataaagtgggttatttgctcgcaacggtatattttagaaccgaaaatcctacatctatgaaaagctacgtagctgctctttacgcaaactttctaacaactaaacctctccccttttaattttcagagggatgggcccgtccttccctttacctccaatcatacgagagtggcctttctactctcgggtgtgggtacacctactatcctatccattccttgtagttgtctcacctcgtgatccgaacactactcttcaatcctgttttgatttgcaggcctacatacacaataactacaagtctcactcgactgcatacctagtgtgtaggctggcaggtcacatctcgcgtctctacactcacgtgaaccatcgtctgccatccttcacatatctctatttctcctcaggccatgtctaaattctactccctccttccatctatatagggtctaatacattttttgagactaactttaatcaaatgttaaagcaataatatatgacatgcaacttttttttttgcgaaaaatatatgacatgcaacttacacaaagcataccaccaaattcgtatgtgaaagaagctttcaatgatataatttttacgttatgcatcttatgtactattaatcttgtcaaaagtcaaatgaggtctagaaaaatgcattatgccctatataaatggaacgatggagtaaaatggatgcatcatgcatgatcagtcaaatcacttctacccccaatctctctctctctcttgaaagctctctcgcatttattatcagcgctctctcttgcgcactctctctctctctcaatcagagaaataatctctcttctccatcgcttgcttctctcacagactctcattcacatatttcaataaataaaataaggcacgcatcacctctctctctctcttcaatttctcaagggaaaagtgtctttctctcgaagtctgtcatgcatgcttgctctctctctcctcaaaatccacacatttgctctcttgcgctatagttgagagtgaggtgactgctacagaacctgccctgacatatctatcgtgaacaattgtgcctatgacctacgccctgcctaggctcacttactggtttgaacgcatgcgtcctgcaaacagtctgcaatgcgtcggtccatctcgtgaatctcaaaggaattcaaaggccaagataagaggtgtgtgtacacgtgag

SEQ ID NO: 72 - protein, 399 aa, Triticum aestivum
MAVEAPQPEQAAGESVEQGAAAGGGRLKKGPWTPDEDQLLVEHVRRHGEGSWNAVRRETGLLRCGKSCRLRWANHLRPNLKRGPFSPEEERLILRLHALIGNKWARISAHLPGRTDNEIKNYWNTRLKRRKRAGMALYPPDVEREVALVRAGKLRPIVDADGNASSLQAPLLLDAAADQFAWPAAPPFHPAYNNVAPPQPFQFTGNISHNPQALLAAQVPYLHHDEVSAGLGHANKLYADAPGMPPLVPPAVQELPSNQSPADAGGPLEMLVLEQDQRLPGAALLRVTSMPELVYNENDYSAWPSGLSGGSGSRSEGDVTSHYGGKCDCFDGVKPAKRMAASLVVAEEEVSGLFGGEDLVEVWPDKPPESITKDDFNLQMEMQHLMPPVPLSADEHGLN

SEQ ID NO: 73 - DNA, 1200 bp, Triticum aestivum
atggctgtggaggcgcctcagcctgaacaagcagcgggtgaatccgtggagcagggtgcggcggcgggcggcggcagactgaagaagggcccgtggacgccggatgaggaccagctgttggtggagcacgtacggcggcacggggaagggagctggaacgcggtgcggcgggagacggggctgctgcgctgcggcaagagttgccggctccggtgggccaaccaccttcgccccaacctcaagcgtggccccttctcgccggaggaggagcgcctcatcctccgcctccacgcgctcatcggcaacaagtgggcgcgcatctctgcacacctgccggggaggacggacaatgagatcaagaactactggaacacgcggttgaagcggcggaagcgcgccggcatggccctgtacccgccggatgtcgagcgggaggtggcgctcgtccgcgccggcaagctgaggcccatcgtcgacgccgacggcaacgccagcagcctccaagcaccgctcctcctggacgcggccgcggaccagttcgcctggccggctgcgccgccgttccaccccgcctacaacaacgtcgctcctccgcagcctttccaatttaccggcaacattagccacaacccgcaggccctcctcgcagcgcaagtaccgtacctccaccacgacgaggtttccgccggcctcggccacgccaacaagctttacgccgacgcaccggggatgccaccgttggtgccccccgctgtacaggagctcccttcgaaccaatctcccgcggacgccggcgggccgctcgagatgctcgtcctcgagcaggaccagcggctgcccggcgccgccctgctccgcgttacgtccatgccggagctggtctacaacgagaacgactactccgcgtggccgtccggcctcagcggtggcagtggcagccgatccgaaggcgacgtgacctcgcattatggcgggaaatgcgactgcttcgatggcgtgaagcctgcgaagaggatggccgcgagcttggtggtggcagaggaggaggtgtccggcctgttcggcggcgaagatttggtggaggtgtggcctgacaagccgccggagtcgatcacgaaagacgacttcaacctccagatggagatgcagcacctcatgccccccgtgccgctctcggctgacgaacacggcttgaattaa

SEQ ID NO: 74 - DNA, 4285 bp, Triticum aestivum
  modified_base (634)..(634): a, c, t, g, unknown or other
gcttcgctaagcactacgaaggaggaggagttggaggaggagagggctgcgctaggcaaggggtgcggctgccctctctctccctcactatatatagggggaaggggggtggaggaggcgccctagggttccctaggggaggggcggcggccacaggggaaaccctagatgggtttgggtgcccccaccccctaggaaacttgccccccaagctgggaggggcggctgccctaggggtggcgcccccacctctcctggttacgtgagaggggttgggaggggcgcacagccccttagtgggctgattcatgccaatccaacagacactttcggagatacctgtagtgcacctttatagccacccagttacgttgtgacgtttggtacacccaaagcattcctacggtatccgggagttggacaatctcatggtttaaggaaacgatacttgacattagaaaagctcttagcaaacgaactacacgatcttgtgctatgcttaggattgggtcttgtccatcacatcattctcctaatgatgtgatcccgttatcaatgacatccaatgtccatggtcaggaaaccataaccatctattgatcaacgagctagtcaactagaggcttactagggngtggtctatgtattcacacatgtattacggtttccagttaatacaattatagcatgaacaatagacaattatcatgaacaaggaaatacaataataaccattttattattgcctctagggaatatttcaacaggcagcaggcagccaaacatcggatacgcccatgtatgtgatatgtgaccgtatttgcacgtccgcacaagttcgatgatcagaatcacgtattttacaagtttatgcaccaaactgatggtcgcgtgcaagtttaaagactccaagtgtatttacctctaaacttatacatcaactgtcggagatgctcttctgggcagcaaaaacaatatagtgtggatgctctactagcttctagatctcttcaacacacgggggaagatggattcacagaaggcatgcagggatgcatgcgccccttcatgcatggccgcatgcatcatgcatggactggaccgattcaataggaggaccatcaatctttcctgccattattttcgcgttctccttctttccccatttttcctctcctctttttggtccgccacccctactagattgacaaaaaacaaaacaaatatttccctttattctcataatctttttctggtagctccggcgagttctgctcctctctagtagaggatgtgctcgggatgctaggtttcagtttctagattgattaggaacatatacgtacaatgcattgagcttttgatcttccattcattcatgtttttgtcttcgatggtttctgactcctccggcccggcgatgcgtgggaggtaggcgacgagatcatccgcctctctccccctcttctcgatctcgatcgcatgtaagctttgagaagaggaagaggaggagagaggagaggtgaggcggatcatttcaccggttcgtcgatcgatcgatggctgtggaggcgcctcagcctgaacaagcagcgggtgaatccgtggagcagggtgcggcggcgggcggcggcagactgaagaagggcccgtggacgccggatgaggaccagctgttggtggagcacgtacggcggcacggggaagggagctggaacgcggtgcggcgggagacggggctgctgcgctgcggcaagagttgccggctccggtgggccaaccaccttcgccccaacctcaagcgtggccccttctcgccggaggaggagcgcctcatcctccgcctccacgcgctcatcggcaacaagtgggcgcgcatctctgcacacgtgagtaccaccggtcattcgatccctttaccccgcctcgccattagaatttcttgcctaccattgcattcgactctatcgattgcctggtgctcgatctgcgtctgcatgcagctgccggggaggacggacaatgagatcaagaactactggaacacgcggttgaagcggcggaagcgcgccggcatggccctgtacccgccggatgtcgagcgggaggtggcgctcgtccgcgccggcaagctgaggcccatcgtcgacgccgacggcaacgccagcagcctccaagcaccgctcctcctggacgcggccgcggaccagttcgcctggccggctgcgccgccgttccaccccgcctacaacaacgtcgctcctccgcagcctttccaatttaccggcaacattagccacaacccgcaggccctcctcgcagcgcaagtaccgtacctccaccacgacgaggtttccgccggcctcggccacgccaacaagctttacgccgacgcaccggggatgccaccgttggtgccccccgctgtacaggagctcccttcgaaccaatctcccgcggacgccggcgggccgctcgagatgctcgtcctcgagcaggaccagcggctgcccggcgccgccctgctccgcgttacgtccatgccggagctggtctacaacgagaacgactactccgcgtggccgtccggcctcagcggtggcagtggcagccgatccgaaggcgacgtgacctcgcattatggcgggaaatgcgactgcttcggtgagttggatcttgaccatcgtctctctctcaatccaaatacgtcacgtccgactccggtgagttaacaatgccatgcatgataaatgtcgtcgacacacgcgcagatggcgtgaagcctgcgaagaggatggccgcgagcttggtggtggcagaggaggaggtgtccggcctgttcggcggcgaagatttggtggaggtgtggcctgacaagccgccggagtcgatcacgaaagacgacttcaacctccagatggagatgcagcacctcatgccccccgtgccgctctcggctgacgaacacggcttgaattaattagcacaacgccgcttcgcgaacaaaactggaacagttcaaaaggacaagggatttaaaagaaaaaaaaatagtgtactactgtagtaaaaaaatcagttaaggcccatcatgaaaatgtttgtctttgtctttatgcaacaagagatggattatgtttgtaaaaattgattcgcggaagcaagccaaggaacatggtccatccatccacaaagtgggttatttgctcgcgacagtatattttagaaccgaaaatctacatctatgaagagctacgtagctctttatgtaagcttcctaacaactaaacctctccccccttgatttttagaggggtgggccgtccttcccctcacctccaatcatatttatccacctagtttgttacgttaattacgtagaacaaccgcacgtcaagtcaatttattaaatctcaaacgatattatatccgattgtacatgatcatccgaagtgtcatggatcacatcaaaatgggtagaattaggttctaggttgagtatggccctcacacaatgatgaacaaatgcattagcaccctcctaattgaactgaaacttaaaaccctcaaagagcgagtgagcaatccatgttgccacaacccaacacaaattccccaatcaattcatccaccatcgtagcttttcaatatgcaggagctcttctccatataagaggaatatgtacggggatattgggtctccctggcgaatgcctatggatggccgaaaagatgataataattcaccattaacctttccctggaagcttagtgaagagacaacctcatcactaatgaccatttatcttcaaattttagttgttatatgattccttgtagatagacctactcaatatgatcatatgccttgtcattatttttcttgggagagggggggggggggttcatcatgtcaattttcactacacactagtcttacttgcctttatcgctccacacagagtgaatacatccatatgtcatcaaaacattctctgtaataggcttccatggtgttgggaaacgttgcatggaaaacaaaaaaatttctacgcgcacgcaatgatctatccatggagatgcatagcaacgagggggagagtgtgtctacgtaccctcgtagatcgaaagcggaagcgtttcccaacgcgattgatgtagtcgaactttcttcgcgctccaccgatcaagtaccgaacgtacgacacctccgagttctgcacacgttcagctcggtgacgtccctcgccttcatgatccagcaagatgtcgaggttgtagatga

SEQ ID NO: 75 - protein, 602 aa, Triticum aestivum
MAPPGLHGLPVALVIAAAVLGSFCLRLAASQQQGEEAAGEEAERQRYNFRFVRHARDAPLVSHYNYIVVGGGTAGCPLAATLSERSRVLLLERGGYPYGNRNVSSEYHFADALADTSPWSPAQRFVSEDGVVNARARVLGGGSCLNAGFYTRASSEYVRAAGWDARLVNASYRWVERELVFRPEVPRWQSALREGLLQTGVTPDNGYTFDHVPGTKIGGTIFDSAGRRHTAADFLRSANPRRLTVFLHATVSQILFRRREGSASPVAYGVVFTDPMGVQHRVYLRGVGRSEVILSAGTLGSPQLLMLSGVGPRAHLERHGVRAVVDRPMVGQGVADNPMNSVFVPSPVPVALSLVQVVGVTRFGSFIEGVSGSQFGIPLHSRRRAHSFGMFSPMTGQLGTLPPRERTAEAMRRAAEVMQGLDRRAFRGGFILEKILGPLSTGHVELRSTDPHANPAVTFNYFRDPRDVERCVRGIQTIERVVRSRAFARFTYANATAMDAAFDRAALAKFLNLLPRHPRDTRPLQQYCRDTVMTIWHYHGGCHVGPVVDQDYRVIGVAGLRVVDSSTFKYSPGTNPQATVMMLGRYMGLRIQEEGWRPGPRN

SEQ ID NO: 76 - DNA, 1809 bp, Triticum aestivum
atggcgccgcctggccttcacggcttacccgtggcgcttgtcatcgccgccgcggttcttggctcgttctgcctcagactcgccgcctcacagcagcagggagaggaagctgcgggggaggaggcggagaggcagaggtacaacttccggttcgtgcggcacgcgcgggacgcgccgctcgtgtcccactacaactacatcgtggtcggcggcggcacggccgggtgcccgctggcggcgacgctgtcggagcgctcgcgcgtgctcctcctggagcgcggtggctacccgtacggcaaccgcaacgtgtcgagcgagtaccacttcgcggacgcgctggcggacacgtcgccgtggtcgccggcgcagcggttcgtgtcggaggacggcgtggtgaacgcccgcgcgcgcgtgcttggcggcgggagctgcctcaacgccgggttctacacgcgcgccagcagcgagtacgtgcgcgccgccgggtgggacgcgcgcctggtgaacgcgtcgtatcggtgggtggagcgcgagctggtgttccgcccggaggtgccgcggtggcagtccgcgctccgggagggcctcctccagaccggcgtcaccccggacaacggctacaccttcgaccacgtccccggcaccaagatcggcggcaccatcttcgacagcgccggccgccgccacaccgccgccgacttcctccgcagcgccaacccgcgacgcctcaccgtgttcctgcacgccaccgtgtcgcagatcctcttccggcgcagagaggggtcggcgagcccggtggcgtacggcgtggtgttcacggacccgatgggggtgcagcaccgcgtgtacctgcggggcgtggggagaagcgaggtgatcctgtcggcggggacgctggggagcccgcagctgctgatgctgagcggcgtcggcccgcgcgcgcacctggagaggcacggcgtccgcgccgtcgtggaccgccccatggtcgggcagggcgtggccgacaaccccatgaactcggtgttcgtcccgtcccccgtccccgtggcgctctccctggtccaggtcgtcggcgtcacccgcttcggcagcttcatcgagggcgtcagcggctcccagttcggcatccccctccactcccgccgccgcgcccactccttcggcatgttctcccccatgacggggcagctggggacgctgccgccgagggagaggacggcggaggcgatgcggcgggcggcggaggtgatgcaggggctggaccggcgggcgttccggggcggcttcatcctggagaagatcctggggccgctgtcgacggggcacgtggagctgcggtcgacggacccgcacgcgaacccggcggtgaccttcaactacttccgggaccccagggacgtggagcggtgcgtgcgcgggatccagaccatcgagcgggtggtgcggtcgcgggcattcgcccgcttcacctacgccaacgcgaccgccatggacgccgccttcgaccgcgccgcgctggccaagttcctcaacctgctgccccggcacccccgggacacccgcccgctgcagcagtactgccgggacaccgtgatgaccatctggcactaccacggcggctgccacgtcgggcccgtcgtcgaccaggactaccgcgtcatcggcgtcgccggcctccgcgtcgtcgacagctccaccttcaagtactcccccggcaccaacccgcaggccaccgtcatgatgctcggcaggtacatggggctcaggattcaggaggagggatggagaccaggacccagaaattaa

SEQ ID NO: 77 - DNA, 4980 bp, Triticum aestivum
cacaccttactccatgtgctagtaaacgttttggtaaatatagtaacgtaattaatttgcttaccgggtgatgggacagcacccgctttgctaaatcaaacatttttctccacatgctagtaaaactcttgctagatatagtaatataatcaagatggttaccatatgctcagatgcaagcaaaggcccgccgattccctagatcaggccatctcttcgctttattgtatgcatgctagtaaaaaaaattaggcagtaatcaatcaacaagaaagtaccacttctagtaaatgtcctggtcacttatttgttaggtaaatttaattgtaaaaaatagtttcattcatcatacagtaagtagtagtagtagtaatatgatgttgattgattagtaaaatttattcaaattttaccatcttttctaatcaaatagtaaagtacaaattataattatgcatggtaatgggattacccttgttctgttggtggatgcatgggcgacgtggggtttgttacattgggatggcagtaatactagtaatgcgttactcattgattagtaaaatatatccaacttttaccatctttcctaatcaaatagtaaagacacgccataattatggtaatgggattaccctcgttctattgcatggatggatgggcgacgttggtattgttacattgggatgcggggccgcgcacgtccaagcggtccgatggtgctgtagtgtggccggagcgcataattaggtaatctacgcgtagccacactttagcagtcctatatatatatatatatatatatgtatatatatatatatatatatatatatatatatatatatttaaaaacatgaggatttcttggtttggactgacaaagtaatgtcactcgattattaacaacttgactacaatattttactgctggtaaggattgcacctggagatgccctaagggcaaagaccaagcaggagcaaaggtacgtccagatttgaagccttgaaggttacgtccactgaatctcttctccatcacacgactaacactcactcgccactaaaaaatggctaattactttagcctgcaaatgcaaaggatcccgacgacggcgctgttctttctatcatcactcgtccggatccttcggagctcatctttgcactagctaggaatcaatcagcaccgcatctgcacccctaaattggcaactactctttatctaatcgaattcgattcacgatccccatccatctatataaacaaaaccagaggttaaccagcaatggcgaagctagattactctgacgaatttcatggcgccgcctggccttcacggcttacccgtggcgcttgtcatcgccgccgcggttcttggctcgttctgcctcagactcgccgcctcacagcagcagggagaggaagctgcgggggaggaggcggagaggcagaggtacaacttccggttcgtgcggcacgcgcgggacgcgccgctcgtgtcccactacaactacatcgtggtcggcggcggcacggccgggtgcccgctggcggcgacgctgtcggagcgctcgcgcgtgctcctcctggagcgcggtggctacccgtacggcaaccgcaacgtgtcgagcgagtaccacttcgcggacgcgctggcggacacgtcgccgtggtcgccggcgcagcggttcgtgtcggaggacggcgtggtgaacgcccgcgcgcgcgtgcttggcggcgggagctgcctcaacgccgggttctacacgcgcgccagcagcgagtacgtgcgcgccgccgggtgggacgcgcgcctggtgaacgcgtcgtatcggtgggtggagcgcgagctggtgttccgcccggaggtgccgcggtggcagtccgcgctccgggagggcctcctccagaccggcgtcaccccggacaacggctacaccttcgaccacgtccccggcaccaagatcggcggcaccatcttcgacagcgccggccgccgccacaccgccgccgacttcctccgcagcgccaacccgcgacgcctcaccgtgttcctgcacgccaccgtgtcgcagatcctcttccggcgcagaggtacgtacatgcagcgcacgccatgccatgcatgtacatgcaagtcgtggtcgatcggtctgaattgaaatgtatgcgtgcgtgtgccggaatgctgcagaggggtcggcgagcccggtggcgtacggcgtggtgttcacggacccgatgggggtgcagcaccgcgtgtacctgcggggcgtggggagaagcgaggtgatcctgtcggcggggacgctggggagcccgcagctgctgatgctgagcggcgtcggcccgcgcgcgcacctggagaggcacggcgtccgcgccgtcgtggaccgccccatggtcgggcagggcgtggccgacaaccccatgaactcggtgttcgtcccgtcccccgtccccgtggcgctctccctggtccaggtcgtcggcgtcacccgcttcggcagcttcatcgagggcgtcagcggctcccagttcggcatccccctccactcccgccgccgcgcccactccttcggcatgttctcccccatggtatggccgacaccttctccaaactaactccaaacgtgacaatggcaatgccatcgatgcctcgacggtgcccttgattaacaacgactcatcgattcattgatcaccaccagacggggcagctggggacgctgccgccgagggagaggacggcggaggcgatgcggcgggcggcggaggtgatgcaggggctggaccggcgggcgttccggggcggcttcatcctggagaagatcctggggccgctgtcgacggggcacgtggagctgcggtcgacggacccgcacgcgaacccggcggtgaccttcaactacttccgggaccccagggacgtggagcggtgcgtgcgcgggatccagaccatcgagcgggtggtgcggtcgcgggcattcgcccgcttcacctacgccaacgcgaccgccatggacgccgccttcgaccgcgccgcgctggccaagttcctcaacctgctgccccggcacccccgggacacccgcccgctgcagcagtactgccgggacaccgtgatgaccatctggcactaccacggcggctgccacgtcgggcccgtcgtcgaccaggactaccgcgtcatcggcgtcgccggcctccgcgtcgtcgacagctccaccttcaagtactcccccggcaccaacccgcaggccaccgtcatgatgctcggcaggtcagaccaacatacgaattctttctgcttcaactcttcttcttctcctgcactcgatttgctccgacgaaatttgtcaaatgtttcttgatcatttgcctgtctttggatgatcaaactcggtcgaacaggtacatggggctcaggattcaggaggagggatggagaccaggacccagaaattaagcatgtgcattcgatccgttcattcatttcattcacggcggtgtcacccacccagcctccaaccgtaccttcatgcttccttcgtgccgcgcgggctgcttgggagattgcatgggatttcttgtttctttcttccagagattgttttgtgaacagctggttgttagtggttacatacacatttgttgttgtttgttacatgtattattgtaacgcttgtgagataaaatcacacaacgtttgtgagatcaaacactttgcggagatcatttgtgagatgaaacactttgcgttcatcctttttatttatacggccacttcgcatcaacgttccgccatcgctcgcaccggatctcgcggacgttgcgcatggactattacatcgcccgctgctcacctaggaagcccggagatttgcccctccacgaggcggtgctcgtcaacgagctggaggttgtagcgccgctcctcctacacccgccgaaacaccgactgctctcccaccatgacggcgttggagtgcggttacgccggtgggtgcgctgactcatcgccggatgccacctctattgtctggtcctcgccgcgccgctgacatctggcgagctagtcggcaagccaatctcagcccatcacgcacgacaggcttgtcagccggtcgtagtgacggataactcctgcttctgcttcgtcgataggctttcccacatagctccagagctcacggtcatggctgacgtggtgcagtggtgtgcctgaagaggagacaacatttaaatagcggacaccggccaggacactcgatgtggtgagttaatgtgggcgtcaacgaaggtttcacagccgccgcgctagtttaatgtcgccgggccgatggataggaaccggttagaatgcggagcaaagccgtccagccctgtccggtcacgtgtctccgacattggaacagggtggagaccaggaggcgctcttggccggcgcgccgcttcaatgtcggctatagagagaggtcacttccgctctgggccagcattaatgcgaagctagcgctttggagcgatgttggcctgcattaatatgcggcaagtgctttgcgtgggaaatggcgcgggcatggggtagtttatttggtgggtcagggttggtggacgcgtacgtggcagcggtccggatgcccgcaaagaccacctagtctgcatctggtttactgatatgtctccaacatatttacaatttatgaagtattcatgctatattaacatcaatcatatatagttttagtgcacttttatattatttttctagactaacttattaatctactgctcagtgtgagttgttgttttcactagtagaaaaagggtcaaatgtgaagcacattattgccggtttgaatttgagccggcactaatgtgatcattagtgccggttccaacggctaggcgggcaggcatcattagtaccggttcataggcaacctttagcaccggttcatgccacgaaccggtac

SEQ ID NO: 78 - protein, 603 aa, Triticum aestivum
MAAPGLHGLPVVLVVVATVLGSFWIRLAASQQQGEEAAGEEAERQRYNFRFVRHARDAPLVSHYNYIVVGGGTAGCPLAATLSERSRVLLLERGGYPYGNRNVSSEYHFADALADTSPRSPAQRFVSEDGVVNARARVLGGGSCLNAGFYTRASSEYVRAAGWDARLVNASYRWVERELVFRPDVPRWQCALREGLLQAGVTPDNGYTVDHVPGTKIGGTIFDSAGRRHTAADFLRSANPRRLTVFLHATVSQILFRRREGSASPVAYGVVFTDPMGVQHRVYLRGVGRSEVILAAGTLGSPQLLMLSGVGPRAHLEKHGVRAVVDRPMVGQGVADNPMNSVFVPSPVPVALSLVQVVGVTRFGSFIEGVSGSQFGIPLHSRRRGHSFGMFSPMTGQLGTLPPRERTPEAMRRAAEVMQGLDRRAFRGGFILEKILGPLSTGHVELRSTDPHANPAVTFNYFRDPRDVERCVGGIQTIERVVRSRAFSRFTYANASAMDAAFDCAALAKFLNLLPRHPRDTRPLQQYCRDTVMTIWHYHGGCHVGPVVDPDYRVIGVAGLRVVDSSTFKYSPGTNPQATVMMLGRYMGLKIQEEGWRPGRPRD

SEQ ID NO: 79 - DNA, 1812 bp, Triticum aestivum
atggcggcgcctggccttcacggcttaccggtggtgctagtcgtcgtcgcgacggttcttggctcattttggatcagactcgccgcctcgcagcagcagggagaggaagctgccggcgaggaggcggagaggcagaggtacaacttcaggttcgtgcggcacgcgcgggacgcgccgctggtgtcccactacaactacatcgtggtcggcggcggcacggcgggctgcccgctggcggcgacgctgtcggagcgctcgcgcgtgctcctcctcgagcgcggcggctacccgtacggcaaccgcaacgtgtccagcgagtaccacttcgcggacgcgctggcggacacgtcgccccggtcgccggcgcagcggttcgtgtcggaggacggcgtcgtcaacgcccgcgcgcgcgtgctcggcggcgggagctgcctcaacgccggcttctacacgcgcgccagcagcgagtacgtgcgcgccgccgggtgggacgcgcgcctggtgaacgcgtcgtaccggtgggtggagcgcgagctggtgttccgcccggacgtgccgcgctggcagtgcgcgctccgcgagggcctcctccaggccggcgtcaccccggacaacggctacaccgtcgaccacgtccccggcaccaagatcggtggcaccatcttcgacagcgccggccgccgccacaccgccgccgacttcctccgcagcgccaaccccaggcgcctcaccgtgttcctgcacgccaccgtgtcgcagatcctcttccggcgcagagaggggtcggcgagcccggtggcgtacggggtggtgttcacggacccgatgggggtgcagcaccgcgtgtacctgcggggcgtggggaggagcgaggtgatcctggcggcagggacgctggggagcccgcagctgctgatgctgagcggcgtcggcccgcgcgcgcacctggagaaacacggcgtccgcgccgtggtggaccgccccatggtcgggcagggcgtggccgacaaccccatgaactcggtgttcgtcccgtcccccgtccccgtcgcgctctccctggtccaggtcgtcggcgtcacccgcttcggcagcttcatcgagggcgtcagcggctcccagttcggcatccccctccactcccgccgccgcggccactccttcggcatgttctcccccatgacggggcagctggggacgctgccgccgagggagaggacgccggaggcgatgaggcgggcggcggaggtgatgcaggggctggaccggcgggcgttccggggcggcttcatcctggagaagatcctggggccgctctcgacggggcacgtggagctgcggtcgacggacccgcacgccaacccggcggtgaccttcaactacttccgggacccgagggacgtggagcggtgcgtgggcgggatccagaccatcgagcgggtggtgcggtcgcgggccttctcccgcttcacctacgcgaacgcgagcgccatggacgccgccttcgactgcgccgcgctggccaagttcctcaacctgctgccccggcacccccgggacacgcgcccgctgcagcagtactgccgggacaccgtcatgaccatctggcactaccacggcggctgccacgtcgggcccgtcgtcgacccggactaccgcgtcatcggcgtcgccggcctccgcgtcgtcgacagctccaccttcaagtactcccccggcaccaacccgcaggccaccgtcatgatgctcggcaggtacatggggctcaagattcaggaggaggggtggagaccaggacgacccagagattaa

SEQ ID NO: 80 - DNA, 4989 bp, Triticum aestivum
atcgccctttgatcttcgcccttcgatctctagcggcttcgtggggaggacggatcaggagggggatgtggccatgggtgactggtcggcggcgcctccggtcagatctgatctggccaatgccgctggcggtggtggccatctcttccgtcagaggtggtcggcccgaggctggatggtcagatctcgagatacgccatctagtttcggctgcgagtcgagaagacatagttgccggtgtaaaccaagacgattgcaggcgatggcggtgttctgtgtcgttaccttgatgaaggcatcgtcgtgtaattactgtcgacccactcgtgctgctccgggggaaaccctagaatctggtcttccagatcggacgatgatggtactgcagtgttgttttctctcttgggagcatcatttgtggagcaaagctggaatacagaggcaggaggtggagcggcttcgtattgcacggagctttcggtggagatgtcaagtcatgcttggccgataggtgctacgctgtgtcatgcctggtcggcaggtgctacgcacaacagatcttccagaatcttcgcgtctggacggacgagcgcgtggtggtggcaccgtggtggcattgacggatggacggactggcaaggattatgcagatctctctcttgaagatgggtcagcggttcgatgatgatggcgccgtctaaaacgtgtgcatgtggtgtatgcttttggtctgctgcaccggctgtgggtttcgatacgttatgtggatggtcggcgatggcaccggttttagatatggggagtgagaacactccactatcaacttatgtaggtgtgactggtggcttcgggtggctgtgagtatgttcttgttagagctatgttgaataataaataaagatggctgtatgcatcgattgacgcggagttcttaaccttctgttaaaaaaaacagacgacaacactcgctcgccattaaaaaaaggctaattactttagcctgcatgcaaaggatccccatgacgcctctgttctttctatcatcgctcgtccggatccctcggagctcatctttgcactagctaggaatcaatcagcccgcatctgcacccctaattggcaactactctttatctaatcgaactcgaatcacgatccccgtctatctatataaacagaaccagaggtttaccagcaatggcgaagctagattaccctgacgaaattcatggcggcgcctggccttcacggcttaccggtggtgctagtcgtcgtcgcgacggttcttggctcattttggatcagactcgccgcctcgcagcagcagggagaggaagctgccggcgaggaggcggagaggcagaggtacaacttcaggttcgtgcggcacgcgcgggacgcgccgctggtgtcccactacaactacatcgtggtcggcggcggcacggcgggctgcccgctggcggcgacgctgtcggagcgctcgcgcgtgctcctcctcgagcgcggcggctacccgtacggcaaccgcaacgtgtccagcgagtaccacttcgcggacgcgctggcggacacgtcgccccggtcgccggcgcagcggttcgtgtcggaggacggcgtcgtcaacgcccgcgcgcgcgtgctcggcggcgggagctgcctcaacgccggcttctacacgcgcgccagcagcgagtacgtgcgcgccgccgggtgggacgcgcgcctggtgaacgcgtcgtaccggtgggtggagcgcgagctggtgttccgcccggacgtgccgcgctggcagtgcgcgctccgcgagggcctcctccaggccggcgtcaccccggacaacggctacaccgtcgaccacgtccccggcaccaagatcggtggcaccatcttcgacagcgccggccgccgccacaccgccgccgacttcctccgcagcgccaaccccaggcgcctcaccgtgttcctgcacgccaccgtgtcgcagatcctcttccggcgcagaggtgcgcacatgcagtgcacgctatgccccatgcatgtacgtatgcaagtcgatattggtctgagccacatttaaatgcagaggggtcggcgagcccggtggcgtacggggtggtgttcacggacccgatgggggtgcagcaccgcgtgtacctgcggggcgtggggaggagcgaggtgatcctggcggcagggacgctggggagcccgcagctgctgatgctgagcggcgtcggcccgcgcgcgcacctggagaaacacggcgtccgcgccgtggtggaccgccccatggtcgggcagggcgtggccgacaaccccatgaactcggtgttcgtcccgtcccccgtccccgtcgcgctctccctggtccaggtcgtcggcgtcacccgcttcggcagcttcatcgagggcgtcagcggctcccagttcggcatccccctccactcccgccgccgcggccactccttcggcatgttctcccccatggtattgactattgaccgacaccttctccatactaactccaaacgtggcaatggcaatgccatcgatgcctcgacggtgcccttaattaactagtacgtgtgcgtgaatgaccgataacagacggggcagctggggacgctgccgccgagggagaggacgccggaggcgatgaggcgggcggcggaggtgatgcaggggctggaccggcgggcgttccggggcggcttcatcctggagaagatcctggggccgctctcgacggggcacgtggagctgcggtcgacggacccgcacgccaacccggcggtgaccttcaactacttccgggacccgagggacgtggagcggtgcgtgggcgggatccagaccatcgagcgggtggtgcggtcgcgggccttctcccgcttcacctacgcgaacgcgagcgccatggacgccgccttcgactgcgccgcgctggccaagttcctcaacctgctgccccggcacccccgggacacgcgcccgctgcagcagtactgccgggacaccgtcatgaccatctggcactaccacggcggctgccacgtcgggcccgtcgtcgacccggactaccgcgtcatcggcgtcgccggcctccgcgtcgtcgacagctccaccttcaagtactcccccggcaccaacccgcaggccaccgtcatgatgctcggcaggtcggacttgtgcttcaactcttcttctcctgcatccgatttactcccacgaaattcaaatatgtgtgtcgacgtacgtttcctggtcattttttgcatgtgtttggatgatgaaactgggtccaacaggtacatggggctcaagattcaggaggaggggtggagaccaggacgacccagagattaagcatatgcactccatccgttgatccattcattcatgcttccttcgtgccgtggtgggtggaccctgcggcttgggagatgcatgggatttcttgtttatttcttctagggattgttttgtggactggttacatacacattgttgtttgttacatgtaatgtaagcgtttgctgagataaaattgcacgttcgacgcaacatttgtgagatcaaacactttgcatccatcgtttgtgcgatgaaaacactttgcattgatcctttttatagggcaactgtgcatcgatcgttattaactccaaaaaggaaaatattgtacctcgaaacacacaaggtgcatcaaatttgaaattcacaaacgttattatctcctcgtgccctagttgtggtgatgctttattccgagagttcacttcatttcaagagttcacacttcacaaacgttattatctccccatgccctagttgtggcgatgctttattccatgagttcacttccttccaagagttcacacttcacaaacgttattatgtccccgtgccctagttgtggcaatgctttattccatgagttcacttccttccgagagttcaaaacttcacaaacattattatctccccgtgccttattgtggcgatgctttaccgggctacgcctcggaactagatctatggtttctctgcatgttcggtgcaattgttcttgcgggttgagaatatttgtccttgcaggaccggccttttcgatctgtttagtttttgtcagtgtgtcttagtgcttttgttagtttgattttttgttgaactagaatctttccttggctctacagtgaagaccttgtggttcgacaatttgcacttctaggggatcatcccgtcccaagttcattcacagttgaaggcttcccatattaataggtgggcgactaaaggggctctctaaaacctctaccggtgtagtgcctttcttgatgccttggtagaattccgccttccaaaatttattaccatatagaaggtgtatgtgagaggctttattgaaattcttagttttggaagttactttctaatttttgggatctttgatccaagcattgtgtgtgtacattcataagggtgagtgtatgcgcgtgtatatgagcgcttgcgtctatactgtgttcaaaacaaagttggcacgtttgaaaaaaagttatagatatctttaaaaaaaagggaagtgagcctacccaaaaagagagcctatgtgggcttgataaaggtgagatattacacacacacacacacaatttcttgcccacgaggctatttcataaagagctcctattggatgcccgcatgcgtccaatagtcgagctttcgctgaagaggcgtgcaaacgggtcggcccattcgcagacgtctagcaaatttatatttcacgaaaaataaaataatacatgtggggagtcgaattgccgacctcacactggtcagcagcgtcacttaccagtcgagatggcgactaaggtgtcgtaaaacgcagcgctaaagttaaagtacatttttttaaagattatcaatgtttctttgaaaacatgcgaccattttttcttagataatacgaataatgtatgaaaa

SEQ ID NO: 81 - protein, 606 aa, Triticum aestivum
MAAPGLRGSSVALLLAATVLGSFYLRLAVSQQQGQGEEAAGEEEEAQRQRYNFRFVRHARDAPLVSHYNYIVVGGGTAGCPLAATLSERSRVLLLERGGYPYGNRNVSSEYHFADALADTSPRSPAQRFVSEDGVVNARARVLGGGSCLNAGFYTRASSEYVRAAGWDARLVNASYRWVERELVFRPEVPRWQGALREGLLQAGVTPDNGYTVDHVPGTKIGGTIFDSAGRRHTAADFLRSANPRRLTVFLHATVSQILFRRREGSASPVAYGVVFTDTMGVQHRVYLRGVGRSEVILAAGTLGSPQLLMLSGVGPRAHLEKHGVRAVVDRPMVGQGVADNPMNSVFVPSPVPVALSLVQVVGVTRFGSFIEGVSGSQFGIPLHSRRRAHSFGMFSPMTGQLGTLPPRERTAGAMRRAAEVMQGLDRRAFRGGFILEKILGPLSTGHVELRSTDPHANPAVTFNYFRDPRDVERCVRGIQTIERVVRSRAFSRFTYANATAMDAAFDRAALAKFLNLLPRHPRDTRPLQQYCRDTVMTIWHYHGGCHVGPVVDPDYRVIGVAGLRVVDSSTFKYSPGTNPQATVMMLGRYMGLKIQEEGWRPGPRN

SEQ ID NO: 82 - DNA, 1821 bp, Triticum aestivum
atggcggcgcctggtcttcggggctcatccgtggcgctactcctcgccgcgacggttcttggctcattttacctcagactcgccgtctcgcagcagcagggccagggagaggaagctgcaggcgaggaggaggaggcgcagcggcagaggtacaacttccggttcgtgcggcacgcgcgggacgcgccgctggtgtcccactacaactacatcgtggtcggcggcggcacggcgggctgcccgctggcggccacgctgtcggagcgctcgcgcgtgctcctcctggagcgcggcggctacccgtacggcaaccgcaacgtgtccagcgagtaccacttcgcggacgcgctggcggacacgtcgccgcggtcgccggcgcagcggttcgtgtcggaggacggcgtcgtcaacgcccgcgcgcgcgtgctgggcggcgggagctgcctcaacgccggcttctacacgcgcgccagcagcgagtacgtgcgcgccgccgggtgggacgcgcgcctggtgaacgcgtcgtaccggtgggtggagcgcgagctggtgttccgcccggaggtgccgcgatggcagggcgcgctccgcgagggcctcctccaggccggcgtcaccccggacaacggctacaccgtcgaccacgtccccggcaccaagatcggcggcaccatcttcgacagcgccggccgccgccacaccgccgccgacttcctccgcagcgccaaccccaggcgcctcaccgtgttcctgcacgccaccgtgtcgcagatcctcttccggcgcagagaggggtcggcgagccccgtggcgtacggcgtggtgttcacggacacgatgggggtgcagcaccgcgtgtacctgcggggcgtggggaggagcgaggtgatcctggcggcggggacgctggggagcccgcagctgctgatgctgagcggcgtcggcccgcgcgcgcacctggagaagcacggcgtccgcgccgtcgtggaccgccccatggtcgggcagggcgtggccgacaaccccatgaactcggtgttcgtcccgtcccccgtccccgtcgcgctctcgctggtccaggtcgtcggcgtcacccgcttcggcagcttcatcgagggcgtcagcggctcccagttcggcatccccctccactcccgccgccgcgcccactcctttggcatgttctcccccatgacggggcagctcgggacgctgccgccgagggagaggacggcgggggcgatgcggcgggcggcggaggtgatgcaggggctggaccggcgggcgttccggggcggcttcatcctggagaagatcctagggccgctctccacggggcacgtggagctgcggtcgacggacccgcacgcgaacccggcggtgaccttcaactacttccgggaccccagggacgtggagcggtgcgtgcgcgggatccagaccatcgagcgggtggtgcgctcgcgggccttctcccgcttcacctacgccaacgcgaccgccatggacgccgccttcgaccgcgccgcgctggccaagttcctcaacttgctgccccggcacccccgggacacgcgcccgctgcagcagtactgccgggacacggtgatgaccatctggcactaccacggcggctgccacgtcgggcccgtcgtcgacccggactaccgcgtcatcggcgtcgccggcctccgcgtcgtcgacagctccaccttcaagtactcccccggcaccaacccgcaggccaccgtcatgatgctcggcaggtacatggggctgaagattcaggaggagggatggaggccaggacccagaaattaa

SEQ ID NO: 83 - DNA, 5011 bp, Triticum aestivum
tttttgtgcccgtttactatttgctaccttgctgtttttatttatttaaattataaaaatatatttctatcatcaatattacacttttatcaccatctcttcgccgaactagtgcacctatacaatttgccattgtattgggtgtgttggggacacaagaaatttcttgtatttcgttgcagggttgttcgagagagaccatcttcatcatacacctcccacagattgataaactttaggtcatccacttgagggaaaattgctactgtcctacaaaactctgcgcttgaaggcccaacacgagtctacaagaataaagttgcgtagtagacatcatggcgcgatccgaaaggccggtggtgcgggcggagatggtggtgcgggcggcgcggatctgctggagcggcttcggccagaggaggagccggcctcgtggtcgtgcttccccttcctgatccaatgccagcccatggcgccggcgggaggtgggcgagtgggggtgcggcggcgctggctagggtttgctcgcttgtgttggggctggagaaggcaggccggccaggaagtggaagttgtgcactagccggtccacggcttccacattaagaaggacgacgacccctccgcccgtgtgaatgacaaccggggcccgctgctcgtgcgcattgaatttaggcggtggaggtaggtgggcggccaccacgcgtcccgaggcggacgacaagcaatcacgtgcctgtccgttcgacgtccgtgtagccgcaaatcgagcgcaagcgcatgtttgcgccgaaaatgggcggaccggacgcgaaacggacaaaatttacgaacatggtcacgcgttgggccatgtcgtatattcgttttggcctaaacagacaaacacagacaggatgggatcgtgcgttggagttggccttataccaaccaacacggtatgtccactgtgctagagttgctttcatgacagtgacttctcttcgagaaaaaggggcaatttcccagcataacactacggacaagatcaagcaggagttactgaagcacagatttaaaggtaaatttaaactaaatccacgacgagtaatttgaaatggagggagtacatcgggatttgaaggtgacaatcaccaccagatgacaacactcactagccattaagaaaaggctaattactttagcctgcatgcaaaggatcccgacgacgacgctgttctttctatcatcactcctccggatccctcggggggctcatctttgcactacctaggaatcaatcagcaacgcatctgcatccctaattggcaactactctttatctaatcgaattcgcatcacgattccaatctatataaacaaaacctccacattcccagcaatggcgaagctagattaccctgacgatattcatggcggcgcctggtcttcggggctcatccgtggcgctactcctcgccgcgacggttcttggctcattttacctcagactcgccgtctcgcagcagcagggccagggagaggaagctgcaggcgaggaggaggaggcgcagcggcagaggtacaacttccggttcgtgcggcacgcgcgggacgcgccgctggtgtcccactacaactacatcgtggtcggcggcggcacggcgggctgcccgctggcggccacgctgtcggagcgctcgcgcgtgctcctcctggagcgcggcggctacccgtacggcaaccgcaacgtgtccagcgagtaccacttcgcggacgcgctggcggacacgtcgccgcggtcgccggcgcagcggttcgtgtcggaggacggcgtcgtcaacgcccgcgcgcgcgtgctgggcggcgggagctgcctcaacgccggcttctacacgcgcgccagcagcgagtacgtgcgcgccgccgggtgggacgcgcgcctggtgaacgcgtcgtaccggtgggtggagcgcgagctggtgttccgcccggaggtgccgcgatggcagggcgcgctccgcgagggcctcctccaggccggcgtcaccccggacaacggctacaccgtcgaccacgtccccggcaccaagatcggcggcaccatcttcgacagcgccggccgccgccacaccgccgccgacttcctccgcagcgccaaccccaggcgcctcaccgtgttcctgcacgccaccgtgtcgcagatcctcttccggcgcagaggtacgtacatgcagcgcacgcacgcacgccatgcatgtgtacatacaagtcgtagtcgatcggtctgaaatgtatgcgtgcgtgtgccggaatgctgcagaggggtcggcgagccccgtggcgtacggcgtggtgttcacggacacgatgggggtgcagcaccgcgtgtacctgcggggcgtggggaggagcgaggtgatcctggcggcggggacgctggggagcccgcagctgctgatgctgagcggcgtcggcccgcgcgcgcacctggagaagcacggcgtccgcgccgtcgtggaccgccccatggtcgggcagggcgtggccgacaaccccatgaactcggtgttcgtcccgtcccccgtccccgtcgcgctctcgctggtccaggtcgtcggcgtcacccgcttcggcagcttcatcgagggcgtcagcggctcccagttcggcatccccctccactcccgccgccgcgcccactcctttggcatgttctcccccatggtattgacttgactgacaccacctccaaactaactcccaatgtgcaatggcaatgccatcgatgccttgacggagccctagattaactatgtgtgcgtgaatgatcaccaccagacggggcagctcgggacgctgccgccgagggagaggacggcgggggcgatgcggcgggcggcggaggtgatgcaggggctggaccggcgggcgttccggggcggcttcatcctggagaagatcctagggccgctctccacggggcacgtggagctgcggtcgacggacccgcacgcgaacccggcggtgaccttcaactacttccgggaccccagggacgtggagcggtgcgtgcgcgggatccagaccatcgagcgggtggtgcgctcgcgggccttctcccgcttcacctacgccaacgcgaccgccatggacgccgccttcgaccgcgccgcgctggccaagttcctcaacttgctgccccggcacccccgggacacgcgcccgctgcagcagtactgccgggacacggtgatgaccatctggcactaccacggcggctgccacgtcgggcccgtcgtcgacccggactaccgcgtcatcggcgtcgccggcctccgcgtcgtcgacagctccaccttcaagtactcccccggcaccaacccgcaggccaccgtcatgatgctcggcaggtcagaccaacaagatcctttctttctgctacaactcttcttcccctgcattcgatttgccccgacgaaatttgtcaaatgtttgtgtctacgtttcctggtcatttgcctgcctttggatgatgaaattcggtcgaacaggtacatggggctgaagattcaggaggagggatggaggccaggacccagaaattaagcatgcatgcattcgtccgttgattcatttcagccacggtcacccacccagccccaggctccaaccaaccgttcatgcttccttcgtgccgtggactgcttgggagattccatgggatttcttgtttctttcttctagagattgttttgtggactggttacatacacattgttgtttgttacatgtaatgtaacgtttgctggcataaaattgcacaacatttgtggaacagaacactttgcatccatcatttgtgcgatcaaaacactttgcattcatcccttttatacggccactttgcattgatcgttaatgtgttaatgtttgatccagaaagaaagaaattgccacttcattccaagagtttacacttcataaatcaaaacacaaaaggtgcatcaaatttggaatgcgaatgatccacgtccatgtctggatggtccagagctatatggccatatgtccagaccaagaaagtcatccaacgatcccgaacagatccaactatctgatatctcctcgtggcctcaaatggagggacagagatccagtgactggcctctggccaatcacgccgtaactggcggccagccaaccattggatgaaggatgggcagctcaaattaattactatagcagaacattgtagttggcattgtcaacaaaccctgtagaccgggtactgtagacgacctcctttagacagaatcactgtagaccgggtactattcatgcagatccatccgttgatccttgatcgaacagtttggagaagggggccagtcaccacagcaagtcactggatctcaatcccaaatggagggaagaagcagtggagtccaaactgtttgccatgttgggccgacaaccgggctccacctacaaatcccccgggctcctctctctcactctccgcctcacacctcgtgccctagttgtggcgattcttgtctgggctatgcctcggaattagatctacggtttctctgcatgttcagtgcattcgatcttgcgggtttagagtatgtgtccttgcaggaccagtctttcaaatctgttaagttttgtcagtgtgtctcagtgcttttgttagtttgattttttgtggagctagaatctttccttggcactacggcgaaaatcttgcggttcaacaatctgtacttctaggggatcatcccatcccaaattcattcacagctgaaggtttcccatatttttagatgggcgactaaaagggctctctaaaacctctatcggtaatcatgttcgtgcaggtgtactagcggtggcgtggtgtctttgttgaagccttggtagaattccgccttccaaaatttattaccataaagaagatgtatgtgagacatttcattggaattcttagttttgggagttacttcctacttttttggatctttga

SEQ ID NO: 84 - protein, 582 aa, Triticum aestivum
MAFFIVAILLGLLSVSQPARGVNYTFMREAMHAPPVTYYDYIVIGGGTAGCPLAATLSRRYRVLLLERGGSPYDDDRVLNMAHFSDVLSDTSASSPSQRFVSEDGVINSRPRVLGGGSCLNAGFFTRAGAGYTRAVGWDAREVLSAYRWVEDVVAFQPELGPWQAAVRRGLLETGVVPDNGFTFDHIPGTKVGGSIFDPDGRRHTAADLLQYARPEGIDVLLRARVARILFSYKGTKPVARGVVYRDSLGMVHVAYLNQGDANEIILSAGALGSPQLLMLSGVGPSDHLRSFGLDVVVDNPGVGQGMSDNPMNAIYVPSPSPVEVSLIQVVGITRFGSYIEGASGSDWTTRTASSSGDGARQARVFGMFSPQTGQLPTVPPKQRTPEAIARAVEAMSRVPDAALRGGFILEKVLGPQSTGSLALRNLDPDDNPIVQFNYFAHPDDLRRCVAGIEAIERVIRSRSFSRFAYPNFAFPAMLNVTAEFPANLMRVRGGSDPAALERFCRDTVMTIWHYHGGCQVGRVVDRDYRVLGIDALRVIDGSTFNASPGTNPQATVMMLGRYMGVKIEKERTLIEGGARKL

SEQ ID NO: 85 - DNA, 1749 bp, Triticum aestivum
atggcattcttcatcgtcgccatcttgcttggactcctctccgtctctcaaccagcgcgaggtgtaaactacacgttcatgagggaggcgatgcacgcgccgccggtgacctactacgactacatcgtcatcgggggcggcacggcgggctgcccgctggcggcgacgctgtccaggcgctaccgcgtgctgctgctggagcgcggcgggtcgccctacgacgacgaccgcgtgctcaacatggcgcacttctcggacgtgctctcggacacgtccgcgtcgtccccgtcgcagcggttcgtgtccgaggacggcgtgatcaactcgcggccgcgggtgctgggcggcggcagctgcctcaacgccggcttcttcacgcgcgccggcgccggctacacgagggccgtcggctgggacgccagggaggtgcttagcgcctacaggtgggtggaggacgtggtggcgttccagccggagctggggccgtggcaggcggcggtgcgccgcgggctgctggagaccggcgtggtgccggacaacgggttcacgttcgaccacatccccggcaccaaggtcggcgggtccatcttcgacccggacggccggcgccacacggcggccgacctgctgcagtacgcgcgccccgaagggatcgacgtgctcctccgggcccgagtggccaggatcttgttcagttacaaagggaccaagcccgtggcgcgcggcgtggtgtaccgcgactcgctgggcatggttcacgtggcgtacctcaaccagggcgacgccaacgagatcatcctgtcggcgggggcgcttggcagtccgcagctgctgatgctcagcggcgtcgggccctccgaccacctccggtcgttcggcctcgacgtcgtcgtcgacaaccccggggtcgggcagggcatgtccgacaaccccatgaacgccatctacgtgccgtcgccgtcgccggtcgaggtgtcgctcatccaggtcgtcggcatcaccaggttcggcagctacatcgagggcgccagcggctccgactggaccacccgcaccgcctcctccagcggcgacggcgcgcgacaagcccgcgtcttcggcatgttctccccgcagacggggcagctcccgacggtgcccccgaagcagcgcacgccggaggccatcgcgcgcgccgtggaggccatgagccgggtaccggacgcggcgctccgcggcggcttcatcctggagaaggtcctcggcccgcagtccacgggcagcctcgcgctccgcaacctggaccccgacgacaaccccatcgtccagttcaactacttcgcccacccggacgacctccggcgctgcgtcgccggcatcgaggccatcgagcgggtcatccgctccaggtccttctcgcggttcgcgtaccccaacttcgcgttcccggcgatgctcaacgtcacggcggagttcccggcgaacctgatgcgcgtgcgcggcggtagcgaccccgcggcgctcgagcggttctgcagggacaccgtcatgaccatctggcattaccacggcgggtgccaggtcggcagggtcgtcgaccgcgactaccgggtcctcggcattgatgcgctgcgcgtcatcgacggctccacgttcaacgcctcgccggggaccaacccgcaggccaccgtcatgatgctcggcaggtacatgggagtcaaaatcgaaaaggagaggacgctgatcgaaggaggagcgagaaaactgtag

SEQ ID NO: 86 - DNA, 4909 bp, Triticum aestivum
aaaattaatcactactaagccctgaagcataagcaagactacaatttgggtccaattaacatttgcagactacgtaattctagttagctactacaacctccttgcatcgtacctacatgccatacgtcaagctgaatgggttggcatcagttttaaaatttgacaaatgttgagtgtcacgatatgccgcaactgaatgggttggcatttagtcgagcagctcatgggcgtggcggccttagtccatggcgggcagccgcatgtcttggctgaagtgggaggattaggcagtggctggagaagatgcgtggtacgtgcagagcgggtgcagcttaagatgccgcagaagcttgtgtaccctgaggcctgcagcgctcggctccgggccactggctcccgcgcttgccattgccacacatggtcggttctgccaagaaggttgtgccgttcatcgagaagagacggtaaacaatggcgacattcagcggagacagggatcccgtggatgatgtggtgaggaaccaggggcggtggtcagcggcaaactccatcgatggcggttgccagcggagaggtcgcggatggacggccggagaggcagcaccggtggcctggacggccaagccgtcggtcggagaggcggtggcagggcggattgacctcgatctcctggcgctccattttttttccgcgtgcgagaacgacgaagagataagccagccaatgcaacccaatacggagggtcggggctctgaatttgcgagggggttagccagtgctcgggttggcctctcgatattgggaccgaattccagagacgaatatctagaccatccaaacggtggcattcgggaccgacaaacaggcaattccgaatacttgctccgaatgtctacatccaaacaggcaaagaagatttgtaaagcacagatgccatggctagtttctgatggggggacagagaagagcataggagaatgcattggtctgcatggtggcgaatgtgtttgcccaaatgcaaaggtggtgtgggttttcgacgaccccctggcgtttgtttgccggtagtagaaatagcagacaagtacgggacagagccagttatcattgccgaacccgtcgaacaaatttagccgacgcaaaggctgcggagcaccaagagcggaggcttgttccactagcatgcgccgtggaactaccaacccatgcaagatgcaacacaacggtttcttttgaaaactctgctgcttggccagtatataaaaggacacccgctgctgcaagtaagccacatcagacacagaagttctcagcgcaggcagacacaaggtcacaggctatggcattcttcatcgtcgccatcttgcttggactcctctccgtctctcaaccaggtgatcaatcttcttccgttgcccatttcagtcgcattcttgagcatttgcgtcgtgcggtgttgctgatcttgcgattgtgcatggcagcgcgaggtgtaaactacacgttcatgagggaggcgatgcacgcgccgccggtgacctactacgactacatcgtcatcgggggcggcacggcgggctgcccgctggcggcgacgctgtccaggcgctaccgcgtgctgctgctggagcgcggcgggtcgccctacgacgacgaccgcgtgctcaacatggcgcacttctcggacgtgctctcggacacgtccgcgtcgtccccgtcgcagcggttcgtgtccgaggacggcgtgatcaactcgcggccgcgggtgctgggcggcggcagctgcctcaacgccggcttcttcacgcgcgccggcgccggctacacgagggccgtcggctgggacgccagggaggtgcttagcgcctacaggtgggtggaggacgtggtggcgttccagccggagctggggccgtggcaggcggcggtgcgccgcgggctgctggagaccggcgtggtgccggacaacgggttcacgttcgaccacatccccggcaccaaggtcggcgggtccatcttcgacccggacggccggcgccacacggcggccgacctgctgcagtacgcgcgccccgaagggatcgacgtgctcctccgggcccgagtggccaggatcttgttcagttacaaaggtatagtcttgtttaaagaacgcactgccaactgaccgttaagttcgttaacggtataaagtcaagcaatattgccgtggcgcgaatgatttggtcgacgagttcgggcgccaacgagttttttcggtttgcagggaccaagcccgtggcgcgcggcgtggtgtaccgcgactcgctgggcatggttcacgtggcgtacctcaaccagggcgacgccaacgagatcatcctgtcggcgggggcgcttggcagtccgcagctgctgatgctcagcggcgtcgggccctccgaccacctccggtcgttcggcctcgacgtcgtcgtcgacaaccccggggtcgggcagggcatgtccgacaaccccatgaacgccatctacgtgccgtcgccgtcgccggtcgaggtgtcgctcatccaggtcgtcggcatcaccaggttcggcagctacatcgagggcgccagcggctccgactggaccacccgcaccgcctcctccagcggcgacggcgcgcgacaagcccgcgtcttcggcatgttctccccgcagacggggcagctcccgacggtgcccccgaagcagcgcacgccggaggccatcgcgcgcgccgtggaggccatgagccgggtaccggacgcggcgctccgcggcggcttcatcctggagaaggtcctcggcccgcagtccacgggcagcctcgcgctccgcaacctggaccccgacgacaaccccatcgtccagttcaactacttcgcccacccggacgacctccggcgctgcgtcgccggcatcgaggccatcgagcgggtcatccgctccaggtccttctcgcggttcgcgtaccccaacttcgcgttcccggcgatgctcaacgtcacggcggagttcccggcgaacctgatgcgcgtgcgcggcggtagcgaccccgcggcgctcgagcggttctgcagggacaccgtcatgaccatctggcattaccacggcgggtgccaggtcggcagggtcgtcgaccgcgactaccgggtcctcggcattgatgcgctgcgcgtcatcgacggctccacgttcaacgcctcgccggggaccaacccgcaggccaccgtcatgatgctcggcaggtagtgtttcctctcgtttcacgctaatttctggcagtgttcgtgccgcgatggatcaactgatgtgcgcccgtgctttgtaacctgacggacaggtacatgggagtcaaaatcgaaaaggagaggacgctgatcgaaggaggagcgagaaaactgtagcggggtataaccactaggctgttatctgcgtacaggcgtactgcagtcgctatttgctttcaggattcttttaggagtctccatacagagtggaatgcatgctaattgtaattgatgaagttttacaaatggtgtaagccaatgccgcaccttattgtgagatttgttgatgcgttaactgaatctatgtactaaacctgctttggccgtgtgcatcatgatgctccacaggcctaggccttccccctttttgggaagaaaaaggtatactaaacttacgaaatcactaattgagaagtacccgttgcaaagatcacttcaattccctctggttgtgacaagtggcgcacatgcatcgcgtcacttgtcgcaacctgggagtttttccttttttttagattcgtttattcaaaacgttttatctcttaaatcgtgcatccaaatcttgaaccactttcgctgttggattcttcgcgctgagatcttcaaaactagattccatgttgataggttttgacgaacttttttttcacgaaaaaacccgaacgaaagaaccgaaccgggagcacgggttttttgccttttcgaaagaggcacgcccgtgcctctcacaaaatcacaatcgtgcctctcgcggaagtaaaaccgtgactcttgcggaaggaaaaaaaaaaagaaaacgcgtttttttttcatttccgaggagacaccgccgtgactctcgtggaaacacaaccgtacctattgcggaagcaaaaccgtgactctcgcgaaagaaaaaaaaacagaaaacatgttttttcccttttcgagagggacgcccgtgactctcaaagaaagcacaatcatgcctctcgcggaagcaaaatcgtgactctcgtaaaaaaacagaaaacacgttttttttcgttcccaagaggcacggccgtgactttcgcgaaagcacacccgtgcctctcgcggaagcaaaaccgtgactctcgcgaaagaaaaaaaaacagaaaacacgtttttttcgttttcgagaggcacggccgtgactctcgcgaaaggacacccgtgcctctcgcggaagcaaaaccgtgactctcgtgaaaggaaaaaaacgcgttttttcgtggtatttttttttccaatttttttaattgaaaagctgaggaagaccggtggaaaaccaaaacattgaaaaacccaaaaaaaatcgtttaaaaagccgaaaacatgtgcggaagaataaaaaaataaaatccggagggagcgcccagagcgcgacacgtgacgaattgctgagagcgcgccaagtgacgctgattgttgcgaaactcccgaaggagcgctcgttaactagttgctctcctaaacttgctacaagaatgtgcttattttattgctagaatgacgaggaaacaaaagaacttttatttagaagaggaaaaaagcttgacttgccaaaagtatagttgacgccttgccccttcccctctcctccggcaccgggacgc

SEQ ID NO: 87 - protein, 582 aa, Triticum aestivum
MAFFIITILLGLLSVSQPARGVNYTFMREAMHAPPVTYYDYIVIGGGTAGCPLAATLSRRYRVLLLERGGSPYDDDRVLNMAHFSDVLSDTSASSPSQRFVSEDGVINSRPRVLGGGSCLNAGFFTRAGVGYTRAVGWDASEVLSAYKWVEDVVAFQPELGPWQAAMRRGLLETGVVPDNGFTYDHIPGTKVGGSIFDPDGRRHTAADLLQYARPEGIDVLLRARVARILFSYKGTKPVARGVVYRDSLGMVHVAYLNQGDANEIILSAGALGSPQLLMLSGVGPSDHLRSFGLDVVVDNPGVGQGMSDNPMNAIYVPSPSPVEVSLIQVVGITRFGSYIEGASGSDWTTRTAASSGDGARQARVFGMFSPQTGQLPTVPPKQRTPEAIARAVDAMSQVPDAALRGGFILEKVLGPQSTGSLALRNLDPDDNPIVQFNYFAHPDDLRRCVAGIEAIERVIRSRSFSRFAYPNFAFPAMLNVTAEFPANLMRVRGGSDPAALERFCRDTVMTIWHYHGGCQVGRVVDRDYRVLGIDALRVIDGSTFNASPGTNPQATVMMLGRYMGVKIEKERTLIEGGARKL

SEQ ID NO: 88 - DNA, 1749 bp, Triticum aestivum
atggcattcttcatcatcaccatcttgcttggactcctctccgtctctcaaccagcgcgaggtgtcaactacacgttcatgagggaggcgatgcacgcgccgccggtgacctactacgactacatcgtcatcgggggcggcacggcgggctgcccgctggcggcgacgctgtccaggcgctaccgcgtgctgctgctggagcgcggcgggtcgccgtacgacgacgaccgcgtgctcaacatggcgcacttctcggacgtgctctccgacacgtccgcgtcgtccccgtcgcagcggttcgtgtccgaggacggcgtgatcaactcgcggccgcgggtgctgggcggcggcagctgcctcaacgccggcttcttcacgcgcgccggcgtcggctacacgagggccgtcggctgggacgccagcgaggtgctcagcgcctacaagtgggtggaggacgtggtggcgttccagccggagctggggccgtggcaggcggcgatgcggcgcgggctgctggagaccggtgtggtgccggacaacgggttcacgtacgaccacatccccggcaccaaggtcggcgggtccatcttcgaccccgacggccggcgccacacggcggccgacctgctgcagtacgcgcgccccgaagggatcgacgtgctcctccgggcccgagtggccaggatcttgttcagttacaaagggaccaagcccgtggcgcgcggcgtggtgtaccgcgactccctgggcatggtgcacgtggcgtacctcaaccagggcgacgccaacgagatcatcctgtcggcgggggcgctgggcagcccgcagctgctgatgctcagcggcgtcgggccctccgaccacctccggtcgttcggcctcgacgtcgtcgtcgacaaccccggggtcgggcagggcatgtccgacaaccccatgaacgccatctacgtgccgtcgccgtcgcccgtcgaggtgtcgctcatccaggtcgtcggcatcaccaggttcggcagctacatcgagggcgccagcggctctgactggaccacccgcaccgccgcctccagcggcgacggcgcgcgacaagcccgcgtcttcggcatgttctctccgcagacggggcagctcccgacggtgcccccgaagcagcgcacgccggaggccatcgcgcgcgccgtggacgccatgagccaggtgccggacgcagcgctccgcggcggcttcatcctggagaaggtcctcggcccgcagtccacgggcagcctcgcgctccgcaacctggaccccgacgacaaccccatcgtccagttcaactacttcgcccacccggacgacctccggcgctgcgtcgccggcatcgaggccatcgagcgggtcatccgctccaggtcgttctcccggttcgcgtaccccaactttgcgttcccggcgatgctcaacgtcacggcggagttcccggcgaacctaatgcgcgtgcgcggcggcagcgaccccgcggcgctcgagcggttctgcagggacaccgtcatgaccatctggcattaccacggcgggtgccaggtcggcagagtcgtcgaccgcgactaccgggtcctcggcattgatgcgctgcgcgtcatcgacggctccacgttcaatgcctcgccggggaccaacccgcaggccaccgtcatgatgctcggcaggtacatgggagtcaaaatcgaaaaggagaggacgctgatcgaaggaggagcgagaaaactgtag

SEQ ID NO: 89 - DNA, 4828 bp, Triticum aestivum
  modified_base (48)..(48): a, c, t, g, unknown or other
agcccatatatggggcggatgtgggaagacccggatgcattggccacntcatgtccagtgccggtagcgcgaccagcggcagatttggtagcgactcagacctcattgactgggacgtcccgcttcgctcggaggacgatgagtaacttgtcccctcttcatcacgttggcatgatagtgcgtggataggggcgggaactggagctctacgtcttcccctatcgctaagcgtcccaatgcgaatgatgacaccgggtccacgcactctgtcgtgcgatccgcatgctctctccactggtgaaggagcagagccgagcctcaggtcacctcacgagcttcatctcatccgactccgacgatagcgacacgaccaccacggaagacgatgacacccctccgaccacggacgcctacacggaggacaactaccgccactccgatgattgcaagagcaagggcttggcgcagatatggtgaactccggctcctaggggcggcgctaggccccaggcaatggggaccttggcctagggcgtggctgctccatcctttgttcaccgattcaccggtgcagacaatgttcattactgtagccgtacttttggcctgggacgtagcctattcctagctccgctactgccagcaccgtatctatctagtttacctatctagtgcccggcgacgaactgcttcttttgatccagtagtacatgtctggtgatgaattttgttgctatgcccgtttctttctatgattgctatgtagtttatctcatgttgcatggatttggatggccggatatgagggggacgactgcgaacactaagaaatccacaaagttagcacatctttttttttctcctcttgcgaaaacactggttaaactgttttttttagaaaggttaaactgctttatgactaccgtggctgcagggtgcgccactgcccacccttgccactaggctacagcctagttctcgattttgttggttgtcaaagagttgatctgatggtgtgtatattagagtggctatacattctcgacgaccccctggcgtttgtttgccggtagtagaaatagcagacaagtacgggacagagcgttatcattgccgaacccgtcgaacaaatttagccgacgcaaaggctgcggaggagcaccaagagcggaggcttgttccactagcatgcgcctagtgccacgccgtgtaactaccaacccatgcaagatgcaacacaacggtttcttttgaaaactctgctgcttggccagtatataaaggacacccgctgttgcaagccggccacatcagaaacagaagttcccagcgcaggcaggcacgagccatggcattcttcatcatcaccatcttgcttggactcctctccgtctctcaaccaggtgctcaatcttctcccgctacccatttcagtcgcgttcttgagcatttgcgttgtgcggtgttgctgattcttgcgactgcgcatggcagcgcgaggtgtcaactacacgttcatgagggaggcgatgcacgcgccgccggtgacctactacgactacatcgtcatcgggggcggcacggcgggctgcccgctggcggcgacgctgtccaggcgctaccgcgtgctgctgctggagcgcggcgggtcgccgtacgacgacgaccgcgtgctcaacatggcgcacttctcggacgtgctctccgacacgtccgcgtcgtccccgtcgcagcggttcgtgtccgaggacggcgtgatcaactcgcggccgcgggtgctgggcggcggcagctgcctcaacgccggcttcttcacgcgcgccggcgtcggctacacgagggccgtcggctgggacgccagcgaggtgctcagcgcctacaagtgggtggaggacgtggtggcgttccagccggagctggggccgtggcaggcggcgatgcggcgcgggctgctggagaccggtgtggtgccggacaacgggttcacgtacgaccacatccccggcaccaaggtcggcgggtccatcttcgaccccgacggccggcgccacacggcggccgacctgctgcagtacgcgcgccccgaagggatcgacgtgctcctccgggcccgagtggccaggatcttgttcagttacaaaggtagtcttgtttaaagattgcactgccaactgaccgttaagttcgttaacggtataaagtcaagcaatattgccgtggcgcgaatgatttggtcgacgagttcgggcgccaacgaatttttttggtttgcagggaccaagcccgtggcgcgcggcgtggtgtaccgcgactccctgggcatggtgcacgtggcgtacctcaaccagggcgacgccaacgagatcatcctgtcggcgggggcgctgggcagcccgcagctgctgatgctcagcggcgtcgggccctccgaccacctccggtcgttcggcctcgacgtcgtcgtcgacaaccccggggtcgggcagggcatgtccgacaaccccatgaacgccatctacgtgccgtcgccgtcgcccgtcgaggtgtcgctcatccaggtcgtcggcatcaccaggttcggcagctacatcgagggcgccagcggctctgactggaccacccgcaccgccgcctccagcggcgacggcgcgcgacaagcccgcgtcttcggcatgttctctccgcagacggggcagctcccgacggtgcccccgaagcagcgcacgccggaggccatcgcgcgcgccgtggacgccatgagccaggtgccggacgcagcgctccgcggcggcttcatcctggagaaggtcctcggcccgcagtccacgggcagcctcgcgctccgcaacctggaccccgacgacaaccccatcgtccagttcaactacttcgcccacccggacgacctccggcgctgcgtcgccggcatcgaggccatcgagcgggtcatccgctccaggtcgttctcccggttcgcgtaccccaactttgcgttcccggcgatgctcaacgtcacggcggagttcccggcgaacctaatgcgcgtgcgcggcggcagcgaccccgcggcgctcgagcggttctgcagggacaccgtcatgaccatctggcattaccacggcgggtgccaggtcggcagagtcgtcgaccgcgactaccgggtcctcggcattgatgcgctgcgcgtcatcgacggctccacgttcaatgcctcgccggggaccaacccgcaggccaccgtcatgatgctcggcaggtagcattcctctcgtaatctcgtttcacggtaatttttggcagtgttcgtgccacgatggatcaactgatgtgcgcccgtgctttgtaacctgacggacaggtacatgggagtcaaaatcgaaaaggagaggacgctgatcgaaggaggagcgagaaaactgtagcggggtagaaccacaagcctgttatctgcgtacaggcgtactgcagttgctatttgctttcaggattcttttaggagtctccgtacagagtggaatgctaattgtaattgatgaaattttacaaattgtgtaagccaatgccgcaccttattgtgaaacttgtcgatgcgttaaccgaatctatgtactaaacctgctttggctgtgtgcataatgatgctgcacaagcctaggccttccccctttttgaaaaaaaagtgtactaaacgagtgcggcgtttctgctcccgaactcatctgcatccctacttacaaaaaaaatcaaaataaatactattttttttaaaaaaaatcaatattttttgtgtggtagataagtttatgtgtgaggtgcgtttcaaatttcaactcatttggacatgtgagcaattctcatcaaaaaagataaattcagtgtatgtaaaaaagtttactgttcacacactgttctgatctgatttgtttttttttgttgagagctgctcagatgtccaaataagttgaaatttggagcgaacctcacgcatagaaatgtctttcacacacaaaaaattgggttttgtttgaaattttttagtatttgttttgatttttttaatcaggtgcagatgagcttgggcaccaaattgtattttcggtactaaactttctacaagaatgtgcctattttattgctagaatgacgaggaaaccaaaaaaaaatagaacaggaaaaaaacttgacttgccaaaaatatagttgacgccttgccccttccccctctcctccggcaccgggacgctgccggggacatctctgtcatcatcgtcgccatcaacttctccggcgttctcatgatggtgatgtgtgagtagttcatcctctgggctgagggtatgtattggtagctatgttttttatctctttctttctctccatgtctttgatggattcgatcttgatgtatcatgagctttattaataaagttggatcatatgatgttcatctcactctattgttttgttggtgaattgggtcttgctctttgaagtttctttatgttggattgaatactttggatttgagattacatgatgcatgtctagtaattaacttgtcgataccatagttacattagagtactcttagcataaaggttgaacgataagtattatatgtgttgtcatagtacgatttctgggattgtcctggcacttagtgggtggttcaatagatcaagattggaaaaacaatatgcaatttcatcatacttcctatagaaatagaaactttgaagtgattctttgctgcactctaagggactagcatgcggtttaattatgttaataatgttgagagttggcactagcgaaagtatgaacccta

SEQ ID NO: 90 - protein, 582 aa, Triticum aestivum
MAFFIATMLLGLLSVSQPARGVNYTFMREAMHAPPVTYYDYIVIGGGTAGCPLAATLSRRYRVLLLERGGSPYDDDRVLNMAHFSDVLSDTSASSPSQRFVSEDGVINSRPRVLGGGSCLNAGFFTRAGVGYTRAVGWDASEVLSAYRWVEDVVAFQPELGPWQAAVRRGLLETGVVPDNGFTYDHIPGTKVGGSIFDPDGRRHTAADLLQYARPEGIDVLLRARVARILFSYKGTKPVARGVVYRDSLGIVHVAYLNQGDANEIILSAGALGSPQLLMLSGVGPSDHLRSFGLDVVVDNPGVGQGMSDNPMNAIYVPSPSPVEVSLIQVVGITRFGSYIEGASGSDWTTRTASSSGDGARQARVFGMFSPQTGQLPTVPPKQRTPEAIARAVEAMSQVPDAALRGGFILEKVLGPQSTGSLALRNLDPDDNPIVQFNYFAHPDDLRRCVAGIEAIERVIRSRSFSRFAYPNFAFPAMLNVTAEFPANLMRVRGGSDPAALERFCRDTVMTIWHYHGGCQVGRVVDRDYRVLGIDALRVIDGSTFNASPGTNPQATVMMLGRYMGVKIEKERTLIEGGARKL

SEQ ID NO: 91 - DNA, 1749 bp, Triticum aestivum
atggcattcttcatcgccaccatgttgcttggactcctctccgtctctcaaccagcgcgaggtgtaaactacacgttcatgagggaggcgatgcacgcgccgccggtgacctactacgactacatcgtcatcgggggcggcacggcgggctgcccgctggcggcgacgctgtccaggcgctaccgcgtgctgctgctggagcgcggcgggtcgccgtacgacgacgaccgcgtgctcaacatggcgcacttctccgacgtgctctcggacacgtccgcgtcgtccccgtcgcagcggttcgtgtccgaggacggcgtgatcaactcgcggccgcgggtgctgggcggcggcagctgcctcaacgccggcttcttcacgcgcgccggcgtcggctacacgagggccgtcggctgggacgccagcgaggtgctcagcgcctacaggtgggtggaggacgtggtggcgttccagccggagctggggccgtggcaggcggcggtgcggcgcgggctcctggagaccggggtggtgccggacaacgggttcacgtacgaccacatccccggcaccaaggtcggcgggtccatcttcgaccccgacggccggcgccacacggcggccgacctgctgcagtacgcgcgccccgaagggatcgacgtgcttctccgggcccgagtggccaggatcttgttcagttacaaagggaccaagcccgtggcgcgcggcgtggtgtaccgcgactcgctgggcatcgttcacgtggcgtacctcaaccagggcgacgccaacgagatcatcctgtcggcgggggcgctgggcagcccgcagctgctgatgctcagcggcgtcgggccctccgaccacctccggtcgttcggcctcgacgtcgtcgtcgacaaccccggggtcgggcagggcatgtccgacaaccccatgaacgccatctacgtgccgtcgccgtcgcccgtcgaggtgtcgctcatccaggtcgtcggcatcaccaggttcggcagctacatcgagggcgccagcgggtccgactggaccacgcgcaccgcctcctccagcggcgacggcgcgcgacaagcccgcgtcttcggcatgttctccccgcagacggggcagctcccgacggtgcccccgaagcagcgcacaccggaggccatcgcgcgcgccgtggaagccatgagtcaggtgccggacgcagcgctccgcggcggcttcatcctggagaaggtcctcggcccgcagtccacgggcagcctcgcgctccgcaacctggaccccgacgacaaccccatcgtccagttcaactacttcgcccacccggacgacctccggcgctgcgtcgccggcatcgaggccatcgagcgggtcatccgctccaggtcgttctcgcggttcgcgtaccccaacttcgcgttcccggcgatgctcaacgtcacggcggagttcccggcgaacctgatgcgcgtgcgcggcggcagcgaccccgcggcgctggagcggttctgcagggacaccgtcatgaccatctggcattaccacggcgggtgccaggtcggtagagtcgtcgaccgcgactaccgggtcctcggcattgatgcgctgcgcgtcatcgacggctccacgttcaatgcctcgccggggaccaacccgcaggccaccgtcatgatgctcggcaggtacatgggagtcaaaatcgagaaggagaggacgctgatcgaaggaggagcgagaaaactgtag

SEQ ID NO: 92 - DNA, 5177 bp, Triticum aestivum
ttggctggggctggcagtacttcttcgagcgccacaagatcgtccccaacgacctcgtcgtgctgcgcatctccggcctaagactgagggtccaaatctacaaccacgaaagctccatcaggtgcagggtgaattgcagtaggcacagctgcatcggtgactttgctttcgtcctctgaacttgtttgtatgaacttgtagttagtttgctgcggtgatgggagaacttgctgtgaacttgttattattttgtccaggattcagcaccttgtggtgaagcagggggcatgggatacccctaatgtctttaaaattatgcctgttagcaatatgtctgtttagttgcttgtttatctgttgttagctgttctttacttgctagtttatgtgctgttagtgctctgcctgctgttgtgcctaatgtggtggtaaggccacatcatttaaatggggtgagcagaacacaaatgtgtatgcagccaaacagctgtggtctgcatctgctcaccctttaagtacaaatacgagcaaccaaacagccgaccctaaagtggtcattgatgcaatacgggcaaccaaacaacatgcatatgttgatttgttgcctgtttttggtgaaccaaactctgatgagatgtggctgaaatgcagacactattcactctagacaaccaaacacatgctaagaaatccacaaagttaacacatctttttcttttcttttgcgaaacactggttaaactgttttatgactacacaacgagcacctttttcctctctagggaatatatattcacctttggtcaatactacctagtaaaaaatgatcaaaaatactccctctgtctaaaaaataagcgactcaattttgtactagctttagtataaagttagtactaagttagtacaaagttgagtcacttattttgggacgtatggagtacctgataaaaaatgatcttgttagttgtcaagagttaatctgatggtgtatattggagtagctatacattctccacaaaaccctggcgtttgtttgccggtagtagaaatagcagaaagtacgggacagagtatcatagccgaacccgtcgaacaaatttagccgacgcaaaggctgcggagcaccaagagcggaggcttgttccagtagcatgcgcctagtgctacgccgtggaactaccaacccatgcaagatgcaacacaacggtttcttttgaaaacttggattgcttggccagtatggcagtatataaaggacatccgatactgcaagtcagccacatcagacacagaagttctcagcgcaggcagcacaaggtcacaagccatggcattcttcatcgccaccatgttgcttggactcctctccgtctctcaaccaggtgctcaatcttcttccgctacccatttcagtcgcattcttgagcatttgcgttgtgcggcgttgctgattcttgcgactgtgcatggcagcgcgaggtgtaaactacacgttcatgagggaggcgatgcacgcgccgccggtgacctactacgactacatcgtcatcgggggcggcacggcgggctgcccgctggcggcgacgctgtccaggcgctaccgcgtgctgctgctggagcgcggcgggtcgccgtacgacgacgaccgcgtgctcaacatggcgcacttctccgacgtgctctcggacacgtccgcgtcgtccccgtcgcagcggttcgtgtccgaggacggcgtgatcaactcgcggccgcgggtgctgggcggcggcagctgcctcaacgccggcttcttcacgcgcgccggcgtcggctacacgagggccgtcggctgggacgccagcgaggtgctcagcgcctacaggtgggtggaggacgtggtggcgttccagccggagctggggccgtggcaggcggcggtgcggcgcgggctcctggagaccggggtggtgccggacaacgggttcacgtacgaccacatccccggcaccaaggtcggcgggtccatcttcgaccccgacggccggcgccacacggcggccgacctgctgcagtacgcgcgccccgaagggatcgacgtgcttctccgggcccgagtggccaggatcttgttcagttacaaaggtagtcttgtttaaagattgcactgccaactgaccgtcaagttcgttaacggtataaagtcaagcaatattgccgtggcgcgaatgatttggtcgacgagttcgggcgccaacgagttttgttttttggtttgcagggaccaagcccgtggcgcgcggcgtggtgtaccgcgactcgctgggcatcgttcacgtggcgtacctcaaccagggcgacgccaacgagatcatcctgtcggcgggggcgctgggcagcccgcagctgctgatgctcagcggcgtcgggccctccgaccacctccggtcgttcggcctcgacgtcgtcgtcgacaaccccggggtcgggcagggcatgtccgacaaccccatgaacgccatctacgtgccgtcgccgtcgcccgtcgaggtgtcgctcatccaggtcgtcggcatcaccaggttcggcagctacatcgagggcgccagcgggtccgactggaccacgcgcaccgcctcctccagcggcgacggcgcgcgacaagcccgcgtcttcggcatgttctccccgcagacggggcagctcccgacggtgcccccgaagcagcgcacaccggaggccatcgcgcgcgccgtggaagccatgagtcaggtgccggacgcagcgctccgcggcggcttcatcctggagaaggtcctcggcccgcagtccacgggcagcctcgcgctccgcaacctggaccccgacgacaaccccatcgtccagttcaactacttcgcccacccggacgacctccggcgctgcgtcgccggcatcgaggccatcgagcgggtcatccgctccaggtcgttctcgcggttcgcgtaccccaacttcgcgttcccggcgatgctcaacgtcacggcggagttcccggcgaacctgatgcgcgtgcgcggcggcagcgaccccgcggcgctggagcggttctgcagggacaccgtcatgaccatctggcattaccacggcgggtgccaggtcggtagagtcgtcgaccgcgactaccgggtcctcggcattgatgcgctgcgcgtcatcgacggctccacgttcaatgcctcgccggggaccaacccgcaggccaccgtcatgatgctcggcaggtagtgtttcctctcgtttcacggtgatttttggcagtgttcgtgccacgatggatcaactgatgcgcgcccgtgctttgtaacctgatggacaggtacatgggagtcaaaatcgagaaggagaggacgctgatcgaaggaggagcgagaaaactgtagcggggtataaccactaggctgttatctgcgtacaggcgtactgcagttgctatttgctttctggattcttttaggagtctccatacagagtggaatgctaattgtaattgatgaagttttacaaattgtgtaagccaatgccgcaccttattgtgagatttgtcgatgcgttaaccgaatctatgtactaaacctgctttggctgtgtgcatcatgatgctgcagaggcctaggccttcccccttttcggggaaaaaaaggtgtactaaatttgctacaagaatgtggctattttattgctagaatggtgaggaaacaaaaaactttttttagaacaggaaaaaagcttgacttgccaaaaatatagcttgacgctgccggggacatctctgtcattgccgtcaccatcaacttctcctgcattctcatgatggtgatgtatgagtagttcatcctcgggggctgagagtatgtattggtagctatgtttttttatctctttctttctctctcatgtttttgatgggtttgatcttgatgtatcatgagctttattaataaagttggatcgtatggtcttcatctcactttattctttttttttggtgaattggatcttgctatttgaagtttctttatgttggattgaatattttggatttgagattacatgatgcatgtctagtaattaacttgcagatacccatagtgacattagagtactcttagcataaaggttgaacgataagtattatatgtgtcgtcatagtacaatttccgggattgtcctggcactttgtgggtggttcaatagatcaagattggaaagacaatatgcaattgcatcctacttcctctgatagaaatagaaactttggagtgattcttttgctgcactctaagggattagcatgcgatttaattatgttaataatgttgagagatggcactagcgaaagtatgaaccctaggccttgtttccaagcatccagacaccatttttacgcacttttgttacttgctaccttactatttttatttgtttaggttacaaaaatatatttctaccatccatattacacatctattatcatccattcgccaaactagtgcatctatagaactgacgattgtattaggtgtgttggggacataaaagaccacttgtatttccttgcagggttgtttgagagagaaccaccttcatcctacatctctcatggattaataaatcttaggtcatccacttgaggaaactttgctactttctacaaaactttacgcttggaggtccaacaaagtctacaagaataaagttgcgtggtagacatcatcgccacattctagagggtgtcgtcgttctacatgaaaccttacatgaaattcattaaaagaaacttgatggagttgtcttcaatgtggattttgagaaggcttatgataaagttaagtggccatttctgcaacaggccctgtgtatgaagggtttcaaatcggcctggaggaagcagatcgaagcctttgtacaaggaggcagtgtcgggatcggggtaaatgatgatgtaggtcattatttccagacacaaaaaggaccacgtcagggggatccggtgtgtcctatccagttcaagattgttacacatatgttggtggtgctcattggtagagccaaagaggaaggctaggtcggagggctcatcccacatctcgtggatggggggtgcgtccatactacaatacgctgatcatacaataattttcatggagcatgacatg

SEQ ID NO: 93 - protein, 246 aa, Triticum aestivum
MVSAQVARNIVGIIGNVISFGLFLSPVPTFWRIYKAKDVEEFKPDPYLATLMNCLLWFFYGLPIVHPNSTLVLTINGIGLVIEGAYIIIFIIYAAKNTRWKMLGVLALEAAFMAVVVAGVLLGAHTHEKRSMIVGILCVIFGSIMYASPLTIMGKVIRTKSVEYMPFFLSLVNFLNGCCWTGYALIKFDIYITIPNALGTIFGLIQLILYFYYYRLTPKKGKNVELPTVLTKNAITSGDVSVTIEK

SEQ ID NO: 94 - DNA, 741 bp, Triticum aestivum
atggtttccgcccaagtggcccgcaacatcgtcggcatcataggcaatgtcatctccttcggcctcttcctctcccctgtgccgacgttctggcggatctacaaggccaaggacgtggaggagttcaagccggacccctacctggcgacgctcatgaactgcctgctctggttcttttacgggctccccatcgtccaccccaacagcaccctcgtcctcaccatcaacggcatcggcctcgtcattgagggcgcctacatcatcatcttcatcatctacgcggccaagaacacaaggtggaagatgctcggcgtgctcgccctcgaggcggcgttcatggctgtcgtggtggccggcgtgctcctcggtgcccacacccatgagaagcgctccatgatcgtaggcatcctctgcgtcatcttcggctccatcatgtacgcctccccgctcaccatcatgggtaaagtgatcaggaccaagagtgtggagtacatgccattcttcctgtcgctggtgaacttcctcaatggctgctgctggacgggctatgcgctcatcaagtttgacatctacatcacgatccccaatgccctcggtacaatcttcggcctcatccagctgatcctgtacttttactactacagattgacccccaagaaaggcaaaaatgtcgaactgcccactgtcctcaccaaaaacgccattaccagcggcgacgtctccgtcaccatcgaaaaataa

SEQ ID NO: 95 - DNA, 4241 bp, Triticum aestivum
gctccaccgaagctccgtccaagacgaagccgctccacctcctgcctctatgctccagcgttgctccataaaagatgctcccaagaaagaaacgacagcgtagtaccgtcattgtccgatctggaagaccaaaacctaggtttctcccaaagcagcatgagtgggtcgacaacagttacacaacgatgtcttcatcaaggtaacggcgcaaaaacgccaccatcgtccgctaacggctcggttttcaccggcaactatgtcttcccgacttgcagccggagccagaggacggatcttcagatctgaccatccagcgtcaggctgaccacctccaacagaggagatggccaccaccgccggctgcaccggccagatcatatctgacccaaggcgccgccgaccagaccaccatggcctccacgcctttgccgccgatccgacgcccgatggcgcgccgaccgcagccgccgcccttccaggtacaggcccgtgccgtgcctgcatctgccgctgcccgaggcagggccgaccaccgcgccgccgcagcgtaaagtggactggcggccgagctcgcaaatggagaacaagagttgggttttttttataataaaaattgttgaggggggacgttagggcatttgatcgatgggggaacgaggtaaccaaacgaaacaaaacgacctgcgtactccactttaatagtagaaagacaattgtatattaatccctccgtcgcatactgtaaaaaacactcttatattagatcgagggagtagagcacgaacaacacttcacggcctccggtaacacgcgtgttgggcttccggagtcgttgggacgactgggtcggtcttgggctttgcagtgtccttgggtgacgccggctgggtcggtgttggtccgtgacagctttgcgctcagggttgtccttatttgttttgcgtacgactgtaccacgactgttacgtgggagaggagcgtgatcctttttccttcgtctggaaaaaggacgcgggcgaggaagaaattgacacggccggccgttggatgggagcacggccggagaaggagttggttgaggactgcactcaaatcaaaccgtttaacctacccttaaccatatccacatcggatataacttggggaaggcgacggggaaccccctactatataagctcggccacccacgccccaaacaaatcacaaccaaccttcctcaagtcgtttgctcccccgagcaatcgagttgtgtttccggcgagcgatcgatctagctgagcatcatggtttccgcccaagtggcccgcaacatcgtcggcatcataggcaatgtcatctccttcggcctcttcctctcccctgtgtaagcccactcctcctcctctcgcctagtctgtatctgtatgtatacatatatgaaaggtggttgctagggcatgaatctgaggctcgttttctacttgtacctacgtacgcaggccgacgttctggcggatctacaaggccaaggacgtggaggagttcaagccggacccctacctggcgacgctcatgaactgcctgctctggttcttttacgggctccccatcgtccaccccaacagcaccctcgtcctcaccatcaacggcatcggcctcgtcattgagggcgcctacatcatcatcttcatcatctacgcggccaagaacacaagggtacgtacgtgcaaccctccgaatgcctcctcatccgtcccactgtctcttttcggctttagtttctgtacagaagatcctccagcccctaacccacgccatgtgcatgtgctctgctgtgtgtgcagtggaagatgctcggcgtgctcgccctcgaggcggcgttcatggctgtcgtggtggccggcgtgctcctcggtgcccacacccatgagaagcgctccatgatcgtaggcatcctctgcgtcatcttcggctccatcatgtacgcctccccgctcaccatcatggtacgtacaccaccccaacttaagggtcgtcgacccgtgagctttgataaccgctttaacttgttagttctggtggctaattaattaatctgcgttgtgcacgtgtggtgtggtaattatgcgctttcaagaaaaaaatacctgcctataattatttttaaagttctagcagatgcttttgacagaccttaatttgttaagtagtacaccttgtttgttgttgattctgcttgaaaatctatgtccatctaaaagatgtacccacctttcattttttaacgttggtgccaaaaccctgttaaaaaaagtccgaactgagttgttcacctctcacgcacccaagttcttctgcagggtgaattactagctcaggctaattgtttttgccaacttaggagtgtactaatactaatattactcaaaaatttaagatgaaagtagtaatattgtactgctatttgcagggtaaagtgatcaggaccaagagtgtggagtacatgccattcttcctgtcgctggtgaacttcctcaatggctgctgctggacgggctatgcgctcatcaagtttgacatctacatcacggtatgtacatacacatacacattggaaataagaagtcgcaaacccagccagacattcactcaagaactcctcagcgtggattgatctaactgttatgtcctctttaaattccttgcagatccccaatgccctcggtacaatcttcggcctcatccagctgatcctgtacttttactactacagattgacccccaagaaaggcaaaaatgtcgaactgcccactgtcctcaccaaaaacgccattaccagcggcgacgtctccgtcaccatcgaaaaataaagttggcttcgttttttagccctagtgattttgagtagttaataccggatgatacttcaacaagttgatgttaattagtactacttcttgttagctattagagtctgagatcgcctttagtttcatgaaccattgtcgtctgtccgagactaatagtgttatttcaagtgtatataaataccaatccagctgagttatcccagagatgtattatgacaccatgtttgctttcctgttttcaatctgctcttacgttttgataccattgattttttaattacagtgtgagatggctttgttaaattaaattaaattattcaatatccatgatgtgtttgtattatgtttcgggcaaggacctctttcgttttctgtacaaaaacacccaaagggcatcttattggtgatgcaacttgaacccggtgtaagagaaaaggagacagacttaacctaattacgggtttggttggatggctcctgctcttttcccgtgacgctgccttgttaccacatggacaggcaacgagcagctctgcagcttggtcaagtatgacgctttgagtcgtccctgctagagatatttttctgaatcttgtaatatgttaattgtttgtcatatatatttcaaagtagtgtgtttgatcgcatggtgtctactgtatatatagacacacttctttgtcaagaaaaatgagttgagtataggaagagctccgctcaaattagatagcccaccaacttgtggctataactagtaagactccagctctttcccacaaattcctattaagggaaataaagataacatccaacttgaagcaacatccaaactagcagcccaggctagctaaacacatcaactttagactacatactgtgttttaatatccaagagcaaggtttttttatcaatttattttctttgtatttgaatgatctcgagtcatctagcgataattactatatgaatcttgactacatactgtatttattaatatccaagagcaaggtacaaataaaacagactggaaattatataataaagtgtcagtatgctttacgcatattaattcttatgttatgtgaattgtttgaaattttgggccacattttggtttccgcccgaggccccaaatttctggagatggccctgctaaacagccgctgaatgcagccgaagaccgatagccttaagtgagttagtttctggccccgcacagctccaaacacttcatttgccacctgttcaaagagcattactccccactgcaacagattttgtttacctcatttctctataaaggaaacgaatagtgaatccaatatccaattagtttgatcacaacaacacatcatccatcggttttttctgtgtgtgcctgaaacaccatc

SEQ ID NO: 96 - protein, 246 aa, Triticum aestivum
MVSADVARNIVGIIGNVISFGLFLSPVPTFWRIYKAKDVEEFKPDPYLATLMNCLLWFFYGLPIVHPNSTLVLTINGIGLVIEGAYIIIFTIYAAKNTRRKMLGVLALEAAFMAAVVAGVLLGAHTHEKRSMIVGILCVIFGSIMYASPLTIMGKVIRTKSVEYMPFFLSLVNFLNGCCWTAYALIKFDIYITIPNALGTIFGLIQLILYFYYYRSTPKKGKNVELPTVLTKNAVTSGTVSVTIEK

SEQ ID NO: 97 - DNA, 741 bp, Triticum aestivum
atggtttccgccgacgtggcccgcaacattgtcggcatcatcggcaatgtcatctccttcggtctcttcctctcccctgtgccgacgttctggcggatctacaaggccaaggacgtggaggagttcaaaccggacccctacctggcaacgctcatgaactgcctgctctggttcttttacgggctccccatcgtccaccccaacagcaccctcgtcctcaccatcaacggcatcggcctcgtcattgagggcgcctacatcatcatctttactatctacgcggccaagaacacaaggcggaagatgctcggcgtgctcgccctcgaggcggcgttcatggctgccgtcgtggccggcgtgctccttggtgcccacacccatgagaagcgctccatgatcgtaggcatcctctgcgtcatcttcggctccatcatgtacgcctccccgctcaccatcatgggtaaagtgatcaggaccaagagtgtggagtacatgccattcttcctgtcgctggtgaacttcctcaatggctgctgctggacggcctatgcgcttatcaagtttgacatctacatcacgatccccaatgccctcggtacaatctttggtctcatccagctgatcctgtacttctactactacagatcgacccccaagaagggcaagaatgttgaactgcccactgtcctcaccaaaaacgccgttaccagcggcaccgtctccgtcaccatagagaaataa

SEQ ID NO: 98 - DNA, 33298 bp, Triticum aestivum
  modified_base (3269)..(6031): a, c, t, g, unknown or other
  modified_base (12402)..(13661): a, c, t, g, unknown or other
  modified_base (13978)..(14002): a, c, t, g, unknown or other
  modified_base (14328)..(14328): a, c, t, g, unknown or other
  modified_base (15893)..(15893): a, c, t, g, unknown or other
  modified_base (16412)..(16412): a, c, t, g, unknown or other
  modified_base (16826)..(16850): a, c, t, g, unknown or other
  modified_base (17707)..(17727): a, c, t, g, unknown or other
  modified_base (18255)..(19803): a, c, t, g, unknown or other
  modified_base (20136)..(20143): a, c, t, g, unknown or other
  modified_base (25418)..(25418): a, c, t, g, unknown or other
  modified_base (27877)..(27877): a, c, t, g, unknown or other
  modified_base (28617)..(29205): a, c, t, g, unknown or other
cagggttgtccttgtttgttttgcgtaagactatatggggtttatccgagtataggagtattgttacgtgggagaggagctcctagctgcgtgatccttttttggctggaaaaaaggacgcgggcgaggaagaaattgacacggccggctgttggatgggagcacggccggctgttggagttggatgaggactgcactcaagtcaaaccgcttaacctacccttaaccatatctacatcggatataacttggggaaagcgacggggaactccctactatataagctcggccacccacgccccaaacaaatcacaaccaaccttccccaagtcgttagttcccccgagcaatcgagttgtgttcccagcgatcgatcgatctaggtgagcatcatggtttccgccgacgtggcccgcaacattgtcggcatcatcggcaatgtcatctccttcggtctcttcctctcccctgtgtaagccaactcctcctcctctcgtctagtctgtatgtatacatatatgaaaggtggttgctagggcacgaatctgaggctcgttttctaattgtacgtatgtacgcaggccgacgttctggcggatctacaaggccaaggacgtggaggagttcaaaccggacccctacctggcaacgctcatgaactgcctgctctggttcttttacgggctccccatcgtccaccccaacagcaccctcgtcctcaccatcaacggcatcggcctcgtcattgagggcgcctacatcatcatctttactatctacgcggccaagaacacaagggtacgtacgctgcaaccctcctaatgcctcctcatacggcctacagtctcttttcggctttagtttctgtacagaagatcctccagcccctaacccaagccatgtgcatgtgctctgttgtgtgtgcagcggaagatgctcggcgtgctcgccctcgaggcggcgttcatggctgccgtcgtggccggcgtgctccttggtgcccacacccatgagaagcgctccatgatcgtaggcatcctctgcgtcatcttcggctccatcatgtacgcctccccgctcaccatcatggtacgtacaccaccccaacttaagggtcgtcgacctgtgatctttgataaccctttaacttgttagttcaggtggctaattaattaatctgcgttgtgcatgtatggtgtggtaatgatgcgttttcaagaaaaatacctgcctataatttatttttaaagttctagtggatgcttttgacagaccttaatttgttaagcagtacaccttgtttgttgttgattatgtccatctaaaagttgcacccacctttcatttttttaatgttcgtgccaaaaccctgttaaaaaaagtccgaattgacttttcacctctcacacacccaagttcttgtacaatatgctacatgatatatttttaatcaaaaaagcctacggtttatttctatccgaaaggtaaacttcctttagagggtgaaatactagctcaggctaattgtaaattacggatgcttttgccaacttacaagtgtattaatactaatataactcaaaatttaagatgaaagtagtaatattgtactgcctatttgcagggtaaagtgatcaggaccaaaagtgtggagtacatgccattcttcctgtccctggtgaacttcctcaatggctgctgctggatgggctatgcgctcattaagtttgacatctacatcacggtatgtacatacacatacacattggaaataagaagtcgcaaacccagccagacatacaatcaagaactcctcagcgcggattgatctaactgttatgtcctctataaattctgtgcagatccccaatgccctcggtacaatcttcggcctcatccagctgatcttgtacttttactactacagatcgacccccaagaagggcaaaaacgttgaattgcccactgtcctcaccaaaaatgccgttaccagcggcaacgtctccgtcaccatcgaaaaataaacttggcttcgttttttagccctaatgattttgagtagttaacaccggatgatacttcaacaagttgatgttaattagtactactttttgtttgctagtagagtctgagatcgccattaatttcgtgaaccattgtcgtctgtccgagactactattgcaaattacaagtgtatataaataccaatcgagctgagttatcccagagatatattatgacaccatgtatgcttgcctgttttcaatctgctcttatgtgatgatacgattgatgttttaattacagcgtgcaatggctttgttaaattaaattattcaatatccatgatgtgttggtattatgtttcgggcaaggacacagacttaacctaattaccggtttggttggatggctcctgctcttttcccgtgacgctgccttgttaccacatcgacagggaacgagcagctctgttggtcaagtatgaggctttgagtccctgctagagatatgtttctaaactaagcgagagcgcaaagctcttattctacgcgccggtcgctaaatcagcgcaatcctcgtccccgctaattgtttgagagtaaacagaaatagaaaatatggtaatgcatttaatttatgttaccacttcacgcgccccaccaccgtcccgtggctccgtgccacccgctaatcataatggtaaaaccggatgcaggaaaaagtaatggaattaaaatggttactgctagtcacgcacaacactccgctcggcaaactagactttattctattccagctaaaatagctactagaatagtaatccccggcgttcttctaatcatagtaacaatcattgtaaaatatagtaaaagaattaatttggttaccattgcacccaccacctccggccttgcgccatatgttgcatagtaacattaggtgaaaaaaatagtaaacatactaattaggttacacctgcacagactacatctccttcatgcatcacaatttaagcacatagtaaatgaacgttcaaacaatagtaatggaattactgttgcactcacaacttccatggcacgtaccataattagggcacatagttactactacgctcaaccacatttcccctggtagtaactaacactagaaaatatagtaactgacttcgttactactatcacaccacaaggcaaaacaacatgtattactatagcattttaaaagaaaaaacatgtattactatagaatgcacatactttannnnnnnnnnnnnnnnnnnnnnnnnnnnnnnnnnnnnnnnnnnnnnnnnnnnnnnnnnnnnnnnnnnnnnnnnnnnnnnnnnnnnnnnnnnnnnnnnnnnnnnnnnnnnnnnnnnnnnnnnnnnnnnnnnnnnnnnnnnnnnnnnnnnnnnnnnnnnnnnnnnnnnnnnnnnnnnnnnnnnnnnnnnnnnnnnnnnnnnnnnnnnnnnnnnnnnnnnnnnnnnnnnnnnnnnnnnnnnnnnnnnnnnnnnnnnnnnnnnnnnnnnnnnnnnnnnnnnnnnnnnnnnnnnnnnnnnnnnnnnnnnnnnnnnnnnnnnnnnnnnnnnnnnnnnnnnnnnnnnnnnnnnnnnnnnnnnnnnnnnnnnnnnnnnnnnnnnnnnnnnnnnnnnnnnnnnnnnnnnnnnnnnnnnnnnnnnnnnnnnnnnnnnnnnnnnnnnnnnnnnnnnnnnnnnnnnnnnnnnnnnnnnnnnnnnnnnnnnnnnnnnnnnnnnnnnnnnnnnnnnnnnnnnnnnnnnnnnnnnnnnnnnnnnnnnnnnnnnnnnnnnnnnnnnnnnnnnnnnnnnnnnnnnnnnnnnnnnnnnnnnnnnnnnnnnnnnnnnnnnnnnnnnnnnnnnnnnnnnnnnnnnnnnnnnnnnnnnnnnnnnnnnnnnnnnnnnnnnnnnnnnnnnnnnnnnnnnnnnnnnnnnnnnnnnnnnnnnnnnnnnnnnnnnnnnnnnnnnnnnnnnnnnnnnnnnnnnnnnnnnnnnnnnnnnnnnnnnnnnnnnnnnnnnnnnnnnnnnnnnnnnnnnnnnnnnnnnnnnnnnnnnnnnnnnnnnnnnnnnnnnnnnnnnnnnnnnnnnnnnnnnnnnnnnnnnnnnnnnnnnnnnnnnnnnnnnnnnnnnnnnnnnnnnnnnnnnnnnnnnnnnnnnnnnnnnnnnnnnnnnnnnnnnnnnnnnnnnnnnnnnnnnnnnnnnnnnnnnnnnnnnnnnnnnnnnnnnnnnnnnnnnnnnnnnnnnnnnnnnnnnnnnnnnnnnnnnnnnnnnnnnnnnnnnnnnnnnnnnnnnnnnnnnnnnnnnnnnnnnnnnnnnnnnnnnnnnnnnnnnnnnnnnnnnnnnnnnnnnnnnnnnnnnnnnnnnnnnnnnnnnnnnnnnnnnnnnnnnnnnnnnnnnnnnnnnnnnnnnnnnnnnnnnnnnnnnnnnnnnnnnnnnnnnnnnnnnnnnnnnnnnnnnnnnnnnnnnnnnnnnnnnnnnnnnnnnnnnnnnnnnnnnnnnnnnnnnnnnnnnnnnnnnnnnnnnnnnnnnnnnnnnnnnnnnnnnnnnnnnnnnnnnnnnnnnnnnnnnnnnnnnnnnnnnnnnnnnnnnnnnnnnnnnnnnnnnnnnnnnnnnnnnnnnnnnnnnnnnnnnnnnnnnnnnnnnnnnnnnnnnnnnnnnnnnnnnnnnnnnnnnnnnnnnnnnnnnnnnnnnnnnnnnnnnnnnnnnnnnnnnnnnnnnnnnnnnnnnnnnnnnnnnnnnnnnnnnnnnnnnnnnnnnnnnnnnnnnnnnnnnnnnnnnnnnnnnnnnnnnnnnnnnnnnnnnnnnnnnnnnnnnnnnnnnnnnnnnnnnnnnnnnnnnnnnnnnnnnnnnnnnnnnnnnnnnnnnnnnnnnnnnnnnnnnnnnnnnnnnnnnnnnnnnnnnnnnnnnnnnnnnnnnnnnnnnnnnnnnnnnnnnnnnnnnnnnnnnnnnnnnnnnnnnnnnnnnnnnnnnnnnnnnnnnnnnnnnnnnnnnnnnnnnnnnnnnnnnnnnnnnnnnnnnnnnnnnnnnnnnnnnnnnnnnnnnnnnnnnnnnnnnnnnnnnnnnnnnnnnnnnnnnnnnnnnnnnnnnnnnnnnnnnnnnnnnnnnnnnnnnnnnnnnnnnnnnnnnnnnnnnnnnnnnnnnnnnnnnnnnnnnnnnnnnnnnnnnnnnnnnnnnnnnnnnnnnnnnnnnnnnnnnnnnnnnnnnnnnnnnnnnnnnnnnnnnnnnnnnnnnnnnnnnnnnnnnnnnnnnnnnnnnnnnnnnnnnnnnnnnnnnnnnnnnnnnnnnnnnnnnnnnnnnnnnnnnnnnnnnnnnnnnnnnnnnnnnnnnnnnnnnnnnnnnnnnnnnnnnnnnnnnnnnnnnnnnnnnnnnnnnnnnnnnnnnnnnnnnnnnnnnnnnnnnnnnnnnnnnnnnnnnnnnnnnnnnnnnnnnnnnnnnnnnnnnnnnnnnnnnnnnnnnnnnnnnnnnnnnnnnnnnnnnnnnnnnnnnnnnnnnnnnnnnnnnnnnnnnnnnnnnnnnnnnnnnnnnnnnnnnnnnnnnnnnnnnnnnnnnnnnnnnnnnnnnnnnnnnnnnnnnnnnnnnnnnnnnnnnnnnnnnnnnnnnnnnnnnnnnnnnnnnnnnnnnnnnnnnnnnnnnnnnnnnnnnnnnnnnnnnnnnnnnnnnnnnnnnnnnnnnnnnnnnnnnnnnnnnnnnnnnnnnnnnnnnnnnnnnnnnnnnnnnnnnnnnnnnnnnnnnnnnnnnnnnnnnnnnnnnnnnnnnnnnnnnnnnnnnnnnnnnnnnnnnnnnnnnnnnnnnnnnnnnnnnnnnnnnnnnnnnnnnnnnnnnnnnnnnnnnnnnnnnnnnnnnnnnnnnnnnnnnnnnnnnnnnnnnnnnnnnnnnnnnnnnnnnnnnnnnnnnnnnnnnnnnnnnnnnnnnnnnnnnnnnnnnnnnnnnnnnnnnnnnnnnnnnnnnnnnnnnnnnnnnnnnnnnnnnnnnnnnnnnnnnnnnnnnnnnnnnnnnnnnnnnnnnnnnnnnnnatcaaagtagtgtgtttgatcgcatggtgtctactgtatatatagacacacttctttgtcaagaaaaatgagttgactataggaagagctacgctccaattacatagcacaccaacttgtggctctaactagtaagactccagcccattctcacaaatttctattaagggaaataaaaataacttccaacttgaagcaacatccaaacttgcagcccatgctagctaaacacatcaactttagactacatgttgtgttttaatatccaagagcaagatgttttttatcaatttattttctttgtatttgaatgatctcgagtcatctagcgatcattactatatgaatctagtaaggttctgtttgatcaatgatcactttataatttgttaggttttgttcctggatcatcattatgtctactagaattaggaaacacgattctagtgctgccaaacaaagactggatcttgaggcccgaactcaaacgagtgccctcaatagatatttagtgagcctgccaacttgatcctgaaaatcaaactgcagaggttaatgttgacgatggtggtgatgataatacaatggtggttgtggaacatgatgcagaaattgatgtcttggagatatgatatagtacgaagatatgattgaagattatattccaagaaatactagacggatggtcctttttggtagaacatgaggttcgttcattgctttgctatcacattgccatttttgcataatatctgatatatggttaaatgagttacaaataaaacagactggaaattatataataaagtgacagtatgctttacgcatattaattcttatgttatgtgaattgttcgaaattttgggccacattttggtttcggcccgaggccccaaatttcgggagatggccctgctaaacagccgctgaatgcagccgaagaccattagccttaagtgagttagtttctggccccgcacagctccaaacacttcatttaccacctgttcaaagagccttactccctactgcaacaggttttttttacctcatttctctacaaaggaaacgaatagtgaatccaatatccaaatagtttgatcacaacaacacatcatccagcagttttttctgtgtgtgcctgaaacaccatcatttcgtgtgtcccagataatccgcggaagtgcagcaaccacaactagcaccaatttttcggtcactccagcaaactggattatgcaggattccagcagtcattaaatatccatggaaataagaataaaggtgcattttggcacattccatataaatcgcacgagaggagtagaggaacagatgatcaattgtatgaggccaaggaggttggcaattgcacatgggttgctaatcctggcgccaaagtagtcgagtactgcgtcctatacgaatggacactaagattcatgtcttctactgtcctccaggtgtggactttgacgaccatggacagaactaatggttctatgatgggattatacagggccaagaaaatacattagcatggtagattggcgattctctacaaaggtacatgaacttggatggtttgcttacagaaacaatgatgtttatgatggttgctgggtttacgtcacatgcaaagtaactcgatggggatgatattgtgctggctcctgtagtggagccctgctccggtgctcccccctaacctaattttgaaggggtatttttgtccccgcgagtttgtttttttcctggcccgctgtagcccagatccaagccctgtctagccttgccaagccctgtatagcccagaccgtctatgtacagtaccctggtccgaaaaaaaaaccacgaccccacgagcacgtaggacctgccggatccaatcattcgcgcagctccatcaatctcgcgggcattcacgcagctccatacttcacgcggtagatctccagcggcgcgcggctacctcgtcaccggcgatctcgtcggacagcgggcgcggcaacgtcgtgaatctccagcgctcccaggtaccacatcccgcatccccccgcacccctctagtctcgctcgcggcaacatctaacgaactgccgctatcagagatatagcggggcgggtaacctacctacccgccggcgcatgcgatcgtggatcttgttccggtagtgctgctcctcgtgatttgggtttcttcagtggagggttcgcgtagcgttggttaccatcggttgtgtacactaggaccatcgttatttgatgtggctgctaacctaggtatccggcggcagaggtaatcacagatctagctaggttttgtagtgccgctcctcgcgattgaaagtgatcacgacgtgtgtcgtggccatcttcctgacttggtttggcagatctgaacggcctcggttggggttgtttacataacatccgtgatcgtgagctatgtgttgatatttcatcattgataatgttttcatcatttgttgtaggaaatggcggacgaggagttaactgatatgatggtagacacggagtttggagaactgatgaagactggatagaagactggtcagatgatgaaaattcagatcttggagttcagtcagagaatgggaacaaatgggaagattttaatgtgagtggcattaccatgttgtaattttttggtgccatccaacaacattatatttttgtgttgaaaatttgtagatggatgagcatgatgatggtcaggaaaacaattcagagctctcaaatgaagattacattagtcaggtacgtaagtgaaaaaaattattggcatgcaaattgaattcattctgaaatattatatgataagtaattatgtatttgtgttgtatttttcagttcatttccgaatggcataatgcgtatgactattacggtgaatccaacacggagacataccttaacgacgaatcatcagatgcacctgattctagggattcgcagtcatcggtcatcatgagtgaggtatttgtgtaatcaatgttctatgaaagtaatgttaaaccatacaaaacattttttatggctatggtttgattgtgtaggtgacagaagatggcggggtaatgaatgtccaagatactgccagtgcagatgataagagggatatgttcatgcagataatggacatgacttttataactcacgatgctgcgtatgatttctacaacagctatgctagaggtaatggtttcagcgttagaaagaataacgtcaggtataccaaaaccgaggcacatcttatgcgttataggaagtttgtttgttccagacaagggaaacgtgacaacaagttgctaacagaggaaggacacagccgtaggctcagagccgagacacgctgcttttgtgaagcacacctgaccgtcaagcttgaccaaaagcgtggggtttggtatgttcaaagttttgaggaccggacgaggtaccttttctttggtcccacagacaaatcaaagagtaccagaagcatgagataatgttcatgggagctgcagggattagaattcatgacctgatggattccttcatcagcaaacatgtatggtatgccggtgttggttttaccaggcgtgaaatatacaacctttgcgccaacgtcatcgttaacttttacggacacacttcctccagagagaatgctctctacccagcgacaccatttttgtgaaaaccccttcatgtgcaaggtttgcaacaggaagggccacttaactttatcgtaggctttctcaaaatcaattttaagaatgaaaccgttcaactttttctggtgcagtttatgtatagttttgtgcagggccactccatctaatatgttgcagccttgcataaatgttgtttgagtggattttacgacatggtcagctacaccgttcaaccgattagtcgctaccttcgtaattttttttaaactttcagagggcaaaccggtcaatattgatgaatacgactagcctccttaatcttaggcaataggataatttccccaaagtttaaacaagaaatatcaaggtcctcggaatgcagttggttaaacaactgaaccaaatctgccttaatcacgtcccaaaagcattgatagaactctgcggaaaaccatctggtcccggcaccttgttgtgttccatctgaaacaccacagttcgaatttcctccttagaaaatggagaggttaggaattcattttcctcttccgtaacttgagtaatgtcatgagtaacggatttgtccagctgaaaattagtttcagctgatggcccaaaaaggtctttgtaaaatttagtgataaaatttctaaatggtacgtccccctctattcagccttcctcccggtcaagggcgaatatacacttccttctatgtctgccattggctagcatttgaaagtatttcgtattatcatcaccttgcaccagcgaatccggcttgctacgttggtaccagttaatctcttcctcacatagtaggcgggcaatctgctcgttaagattgcttgtttgctcaatctcaacagcagatagaggcctcacctccgctattttatcaagggtatcaactaaggtagacaatcgtagttttttctttttgtagatgccagcagtgtgctcggcccatcctcgaaggaatcgatgcaaggcgcggattcgattattccatcgtttaattggtgtgttaccgcgaggctggcgcgcccacaccttgttaaccagctcatgaaatccctctctagtgagccatcccagttcaaatttaaacttgtgacggttagaccttggggttggttgtgcaaaatcggttagcaacggagcgtgatccgataaggcctcgattctttctagcgcccgaacaaaggctaggggatatttatattcccagtcggtggtaattagcacccggaccagttttttaaaggttggcaccaatcggttattggcccaggtatactgacgaccagacatcatgatctccttcagatctagtttgtcaataacaatattaaagagggaaggccacctagtgccaaatcgatcattgtttttttactgctgatatcgaaggatattaaaatcccccccccccaacgattaacatgggatggggattgtctcaacaggtattaaccagttcttttagaaatgcagacttaaactcctcttgagcggcgccatatacagccactagactccagatgaagttgtcggacttatttctaaggtggaacttgatatgatactccccctttgacgtggacaatagttgtaagtatgtagagttaatacctaacaatattcccggggacctcccggccggtggtaagacgggccattcgtaatcaaaaccacatgaaaagtggtccagatcacttgttggaaaatctcgtttagccgactcagtgatagccacaaagtccaacgtatgattcttcacacaatcggcaatttgtttgtgtttagccaagtcaccaagacctctgctattccagaacatgcctctcatgatgaaccaacattatgtttagagacctttggcttcttagaagagctccctcttttctttgctgagttagacttgttcttgcgcaccgacgcggcaagctcaaaaagcgtagtgtcgcgtacaatatcgtcaaggtctacttcagtcgtgtctttaaccaaatgagagagaagcttgccttcatgattggcatcaacatccaaatcctcctcatctgacacgagagggtcgacaaaactcgataactttggagcaaccataggccggtcaaacccaagttgttttagagccttgaccaaaaaatctatctcattctcattactgttggaaatatgccctagaggcaataataaataagttattattatatttctttgttcatgataatagtcttttattcatgctataactgtattattcggaaatcataatacacgtgtgaatacatagaccacaatatgtccctagtgagcctctagttgactagctcgttgtgatcaacagatggtcatggtttcctggctatggacattggatgtcgttgataacgggatcacatcattaggagaatgatgtgatggacaagacccaatcctaagcctagcacaaagattatgtagttcgtatgctagagttttgccaatgtcaagtatctcttcctttgaccatgagagcgtgtaactcctggataccgtaggagtgctttgggtgtatcaaacgtcacaacgtaactgggtgactataaaggtgcactacaggtatcttcgaaagtatctattgttttatgcggatcgagactgggatttgtcactccgtgtaaacggagaggtatctnnnnnnnnnnnnnnnnnnnnnnnnnnnnnnnnnnnnnnnnnnnnnnnnnnnnnnnnnnnnnnnnnnnnnnnnnnnnnnnnnnnnnnnnnnnnnnnnnnnnnnnnnnnnnnnnnnnnnnnnnnnnnnnnnnnnnnnnnnnnnnnnnnnnnnnnnnnnnnnnnnnnnnnnnnnnnnnnnnnnnnnnnnnnnnnnnnnnnnnnnnnnnnnnnnnnnnnnnnnnnnnnnnnnnnnnnnnnnnnnnnnnnnnnnnnnnnnnnnnnnnnnnnnnnnnnnnnnnnnnnnnnnnnnnnnnnnnnnnnnnnnnnnnnnnnnnnnnnnnnnnnnnnnnnnnnnnnnnnnnnnnnnnnnnnnnnnnnnnnnnnnnnnnnnnnnnnnnnnnnnnnnnnnnnnnnnnnnnnnnnnnnnnnnnnnnnnnnnnnnnnnnnnnnnnnnnnnnnnnnnnnnnnnnnnnnnnnnnnnnnnnnnnnnnnnnnnnnnnnnnnnnnnnnnnnnnnnnnnnnnnnnnnnnnnnnnnnnnnnnnnnnnnnnnnnnnnnnnnnnnnnnnnnnnnnnnnnnnnnnnnnnnnnnnnnnnnnnnnnnnnnnnnnnnnnnnnnnnnnnnnnnnnnnnnnnnnnnnnnnnnnnnnnnnnnnnnnnnnnnnnnnnnnnnnnnnnnnnnnnnnnnnnnnnnnnnnnnnnnnnnnnnnnnnnnnnnnnnnnnnnnnnnnnnnnnnnnnnnnnnnnnnnnnnnnnnnnnnnnnnnnnnnnnnnnnnnnnnnnnnnnnnnnnnnnnnnnnnnnnnnnnnnnnnnnnnnnnnnnnnnnnnnnnnnnnnnnnnnnnnnnnnnnnnnnnnnnnnnnnnnnnnnnnnnnnnnnnnnnnnnnnnnnnnnnnnnnnnnnnnnnnnnnnnnnnnnnnnnnnnnnnnnnnnnnnnnnnnnnnnnnnnnnnnnnnnnnnnnnnnnnnnnnnnnnnnnnnnnnnnnnnnnnnnnnnnnnnnnnnnnnnnnnnnnnnnnnnnnnnnnnnnnnnnnnnnnnnnnnnnnnnnnnnnnnnnnnnnnnnnnnnnnnnnnnnnnnnnnnnnnnnnnnnnnnnnnnnnnnnnnnnnnnnnnnnnnnnnnnnnnnnnnnnnnnnnnnnnnnnnnnnnnnnnnnnnnnnnnnnnnnnnnnnnnnnnnnnnnnnnnnnnnnnnnnnnnnnnnnnnnnnnnnnnnnnnnnnnnnnnnnnnnnnnnnnnnnnnnnnnnnnnnnnnnnnnnnnnnnnnnnnnnnnnnnnnnnnnnnncaaccggcaggagccataggagttgtctttatttattgtatgacctgcgtgtcattgaagaacgccatgtaaactactttactttattgctaaacgcgttagtcatagaagtagaaatagtcattggcgtgacaacttcatgaagacacgatgatggagatcatgatgatggagatcatggtgtcatgccggtgacaagatgatcatggagccccgaagatggagatcaatggagctatatgatattggccatatcatgtcacaactatataattgcatgtgatgtttattatgtttatgcatcttgtttacttagnnnnnnnnnnnnnnnnnnnnnnnnnagttcgtcgcttctaagcaccacgtgatgatcgggtgtgatggattcttacgttcacatacaacgggtgtaagaaagttttacacagcgaaaacacttagggttaacttgacgagcctagcatgtgcaaacatggcctcggaacacggagaccgaaaggtcgagcatgagtcgtatagtagatacgatcaacatgaagatgttcaccgatgatgactagtccgtctcacgtgatgatcggacacggcctagttgactcggatcatgtaatcacttagatgaccagagggatgtctatctaagtgggagttcataagatgaacttantatctaagtgggagttcataagatgaacttaattatcctgaacatagtcaaaagaccttttgcaaattatgtcgtaagctcgcgctttagttccactgtttagatatgttcctagagaaaatatagtttaaagttgatagtagcgattatgcgatcagtagaaagcctatgtccttaatgcaccgctcagtgtgctgaaccccaacgtcgtttgtcgatgttgcgaacatcggacatacacgttttgataactacgtgatagttcaattaaatggtttaagtagaggcaccaaagacgttttcgaaacgtcgcggaacatatgagatgtttcgagggctgaaattggggttttcaggctcgtgcccacgtcaagaggtataagacctccggcaattttcttagcctacaaactaagggagaaaagctcaatcgttgagcttgtgctcagattttctgagtgcaacaatcacttgaatcgagtgggagttgatcttccaaatgagatagtgatgtttctccaaagtcattgccaccaagctgctagagcttcgtgatgaactataacatagcagggatagatatgatgatccttgaaatattcgtgatgtttgacaccgcgaaagtagaaatcaagaaggagcatcaattgttgatggttggtgaaaccactagtttcaagaagggcaagggaacaaagggatacttcatgaaacagcaattcagctactgctctagtgaagaaacccaaggttgaacccaaacccgagactaagtgcttctgtaataaggggaacagccactggagcagaactaccctagatacttggtagatgagaaggctggcaaggttgatagaagtatattggatatacattatgctaatgtgtactttactagtactcccagtagcaccagggtataagataccggttcggttgctaagtgttagtaactcgaaataaagagctacggaataaacggagactagctaaaggtgagccgacgatatgtgttggaagcatttccaagtttgatgtgatcaaacatcgcacgctccctctaccatcaagattagtattaaacttgaataactgtcatttggtgcttgcgttgagcatagacatgattggattatgtctatcgcaatacggttattcatttaaggagaataatggttactctatttatttgaataaaaccttcaatggtcttgcacctaaaggaatggtttattgaatctcgatcgtagtgatacatattttcatgccaaaagacataagatagtaatgatagtaccacttacttgtggcactgccatgtaagtcataatggtataaaacacatgaagaagctccatgttgatagatctttggactcactcatttttgaaaagtttgagacatgcgaaccatgtctattggtgtatacgcatgaagaaactccatgcagatggatcgtttggactcacttgattttggatcacttgagatatgcaaatcataccacataggcaagatgactgaaaagcctcggtttcagtaaaatggaacaagatagcaacttntaccacataggcaagatgactgaaaagcctcggtttcagtaaaatggaacaagatagcaacttgttggaagcaacacattttgatgtgtgcagtccaatgagtgctgaggcaagcagtgaatatcgttatgttcttacttcatagatgatttgagtagatgttgagtatatttacttgatgaataacgagtctgaattattgaaaggttcaagtaatttcagtgtgaagttggaagatcgtcgtgataagaggatctatgatatgatcatagagatgaatatctgagtcacgagttttggcacacaattaagacattgcggaaattgtttcgcaattaataccgcctggaacaccatagtgtgatggtgtgtccgaacatcatagttgcaccctattggatatgatgcataccatgatgtctcttatcgaactgccacgatagtttatgggttaggcattaaagacaaccacattcactttaaatagggcaccacgtaattccgttgagacgacaccgnacgtaattccgttgagacgacaccgtttgaattatggtttagagaaacctaagttgtcgtttcttaaaggtttggggctgcgacgcttatgtgaaaaagtttcagcttgataagctcgaacccaaagcagacaaaatgcatcttcataggacacccaaaacagttgggtatacctcctgtctcagatccgaaagcaataagggattgtttctataatcaggtcctttctcgaggaaaagtttctctcgaaagaattgagtgggaggatggtggaaacttgatgaggttattgaaccgtctcttcaactagtgtgtggcagggcacaggaagttgttcctgtggcacctacaccaattgaagtggaagcttatgatattgatcatgaaacttcggatcaagtcactaccaaaccnnnnnnnnnnnnnnnnnnnnnnnnnctgtcttggaagtcatgttgctggacaacaatgaacctacgagctatggagaagcgatggtgggcccggattccgataaatggctcgaggccataaaatccgagaacggatccatggactttggtggagttgcccgatgatcggcaagccattaagataaatggatctttaagaagaagacggacgtggatggtaatgtcaccgtccatgaagctcgacttgtggcgaaaagtttttcacaagttcaaggagttgactacgatgagtttttctcatccgtagcgatgcttaaagtccgtcggattcttgttagcattagctgcatttatgaaatctggcagatggatgtcaagacaagtttccttaccagttttcgtaaggaaaggttgtatgcaatacaatcagaaaagttttgtcgatcctaaggatgctaaaaggtatgcatctcggagttggaatgtacgcatcctaaggatccagcgatccttctaaggactggagtaagcatctcggagttggaatgtacgctttgataagatgatcaaagattttgggtctatacaaagtttatgagaaacttggatttccaaagaagtgagtgggagcactatagaatttctgatgagtatatgttgttgacatattgttgatcagaattgacgtagaatttctggaaagcatatagggttattttgaaagtgtttttcaatggaaagcctggattaagctgcttgagcattgagcatcaagatctataaggatagatcaaaacgcttaatggtactttcaaatgagcacataccttgacatgatcttgaaggtgttcaagatggaccagtcaaagaaggagttcttgnnnnnnnnnnnnnnnnnnnnncagaatagagagaaaggacgaaggtcgtcccctatgcttaagacgtaggctcttcagtatgctatgctgtgtaccgcacctgaagtgtgccttgccatgagtcagttaaggggtacaagagtgatccatgaatggatcacaggacagcggtcaaagttatccttagtaactagtggactaaggaattttctcgattatggaggtggtaatagagttcgtcgtaaagggttatgtcgatgcaagcttgacacctatctggatagctctgagtagagagaccggatacatataatggagcaataatttagaatagctccaagtagaacaattatttggaatagctccaaatagagcgtggtagctgcatctaggagatgacatagagatttgtaaagcacacacggatctgaaaggttcagacccgttgactaaaacctctctcacaagcagaacatgaccaaaccccagatctcattgagtcttgatcacatgatgatgtgaactagtttagtgacactagtaaactcnnnnnnnnnnnnnnnnnnnnnnnnnnnnnnnnnnnnnnnnnnnnnnnnnnnnnnnnnnnnnnnnnnnnnnnnnnnnnnnnnnnnnnnnnnnnnnnnnnnnnnnnnnnnnnnnnnnnnnnnnnnnnnnnnnnnnnnnnnnnnnnnnnnnnnnnnnnnnnnnnnnnnnnnnnnnnnnnnnnnnnnnnnnnnnnnnnnnnnnnnnnnnnnnnnnnnnnnnnnnnnnnnnnnnnnnnnnnnnnnnnnnnnnnnnnnnnnnnnnnnnnnnnnnnnnnnnnnnnnnnnnnnnnnnnnnnnnnnnnnnnnnnnnnnnnnnnnnnnnnnnnnnnnnnnnnnnnnnnnnnnnnnnnnnnnnnnnnnnnnnnnnnnnnnnnnnnnnnnnnnnnnnnnnnnnnnnnnnnnnnnnnnnnnnnnnnnnnnnnnnnnnnnnnnnnnnnnnnnnnnnnnnnnnnnnnnnnnnnnnnnnnnnnnnnnnnnnnnnnnnnnnnnnnnnnnnnnnnnnnnnnnnnnnnnnnnnnnnnnnnnnnnnnnnnnnnnnnnnnnnnnnnnnnnnnnnnnnnnnnnnnnnnnnnnnnnnnnnnnnnnnnnnnnnnnnnnnnnnnnnnnnnnnnnnnnnnnnnnnnnnnnnnnnnnnnnnnnnnnnnnnnnnnnnnnnnnnnnnnnnnnnnnnnnnnnnnnnnnnnnnnnnnnnnnnnnnnnnnnnnnnnnnnnnnnnnnnnnnnnnnnnnnnnnnnnnnnnnnnnnnnnnnnnnnnnnnnnnnnnnnnnnnnnnnnnnnnnnnnnnnnnnnnnnnnnnnnnnnnnnnnnnnnnnnnnnnnnnnnnnnnnnnnnnnnnnnnnnnnnnnnnnnnnnnnnnnnnnnnnnnnnnnnnnnnnnnnnnnnnnnnnnnnnnnnnnnnnnnnnnnnnnnnnnnnnnnnnnnnnnnnnnnnnnnnnnnnnnnnnnnnnnnnnnnnnnnnnnnnnnnnnnnnnnnnnnnnnnnnnnnnnnnnnnnnnnnnnnnnnnnnnnnnnnnnnnnnnnnnnnnnnnnnnnnnnnnnnnnnnnnnnnnnnnnnnnnnnnnnnnnnnnnnnnnnnnnnnnnnnnnnnnnnnnnnnnnnnnnnnnnnnnnnnnnnnnnnnnnnnnnnnnnnnnnnnnnnnnnnnnnnnnnnnnnnnnnnnnnnnnnnnnnnnnnnnnnnnnnnnnnnnnnnnnnnnnnnnnnnnnnnnnnnnnnnnnnnnnnnnnnnnnnnnnnnnnnnnnnnnnnnnnnnnnnnnnnnnnnnnnnnnnnnnnnnnnnnnnnnnnnnnnnnnnnnnnnnnnnnnnnnnnnnnnnnnnnnnnnnnnnnnnnnnnnnnnnnnnnnnnnnnnnnnnnnnnnnnnnnnnnnnnnnnnnnnnnnnnnnnnnnnnnnnnnnnnnnnnnnnnnnnnnnnnnnnnnnnnnnnnnnnnnnnnnnnnnnnnnnnnnnnnnnnnnnnnnnnnnnnnnnnnnnnnnnnnnnnnnnnnnnnnnnnnnnnnnnnnnnnnnnnnnnnnnnnnnnnnnnnnnnnnnnnnnnnnnnnnnnnnnnnnnnnncctccgaggtgccttggggaggatggactcctccccccctcttggccgcacccctttcttggaggaaggggcaaggctgcgcctcccccctctcccttgcccctatatatagtggaggggagggagggtatctatacctgagcccttggcgcctccctccctcccgtgacacctcctcctctcccgtaggtgcttggtgaagccctgcaggattgccacgctcctccatcaccaccacgccgttgtgctgctgctggatggagtcttcctcaacctctccctctctccttgctggatcaaggcgtgggagacatcgtcgagctgtacgtgtgnnnnnnnncggaggtgctgtccgttcggcactagatcatcggtgatttgaatcacgacgagtacgactccatcaaccccgttcacttgaacgcttccgcttagcgatctacaagggtatgtagatgcactctccttatactcgtagctggtttctccatagatagatcttggtgacgcgtaggaaaattttgaatttctgctacgttccccaacaattacgtcctagtgacacccaagtctagtgatatttgaagatactttggaattatcaaaagacataaatgatttgcaagagggggtacctccgaagtcgaggttgcgagtagcattcctgcgcatggccttcaccatagagtcctcgtcggtggctgctgatccgtcagtcccagcatgatgatgcatgctgtgccttagcgacgaaggagtaatatcgcccttggagcccatctcatagactccaagaggcgtagtagactactgcggtgatgaagaagaagatagtgggggctgctcctcagcctcctcatgtccggaagccggcgccgcccccggtggcggaggagtagatgataacgtgcatagctccgccatggcagactcctggccagctcgaattaacagggataagatcacaccacatcgagtcggagatgaaggaaatatgccctagaggcaataataaagttcttatttatttccttatatcatgacaaatgtttattattcatgctagaattgtattaaccagaaacatgatacatgtgtgaatacatcgacaaactcaatgtcactagtatgcctcaacttgactagctcattaatcaaagatggttatgtttcctaaccatagacatgagttgtcatttgattaatgggatcacatcactacgagaatgatgtgattgacatgacccgttccgttagcttagcacttgatcgtttagtatgttgctattgctttcttcatgacttatacatgttcctacaactatgagattatgcaactctcgtttaccggaggaacactttgtgtgctaccaaacgtcacaacgtaactgggtgattataaaggagctctacaggtgtctccaaaggtacatgttgagttggcgtatttcgagattagcttttgtcactccgattgtcggcgaggtatctctggcccctctcggtaatgcacatcactataagacttacaagcaatgtagctaatgagttagttacggaatgatgcattacgtaacgagtaaagagacttgccggtaacgagattgaactaggtattgggataccgacgatcgaatctcgggcaagtaacataccgatgacaaagggaacagcgtatgttgttatgcggtttgaccgataaggatcttcgtagaatatctaggagccaatatgagcatccaggttccgctattggttattgaccggaaatgtgtctcggtcatgtctacatagttcttgaacccatagggtccgcacgcttaaggtttcgttgacagttttattatgattttatgagttttgatgtaccgaaggttgttcggagtcctagatgtgatcacgaacatgacgaggagtctcaaaattgtcgagacataaagattgatatattggacgactatatttggacaccggaaaggttccgggcgagattgtgacaatatcggagctccgggaggttatcagaaccccccgggaggtatatgggccttattgggccttagtggaaaggaggggaaaggagcaagggagcccccccaagcccaatctgaattgggagccccctcccttttcttcctccctccttcctcttccttccttctccttctaattggaaaggggggaatcctactcccggtgggagttggactcccccctagggcgcgccaacccctttggcggccccctcctccactcctttatatacggggaggagggcatcccatagacacaacaattgatctcttgatcttttagccgtctacggtaccccctccaccatagtcctcctcgataatattgtagcggtgcctaggtgaagccctgcgacggtagaacatcaagattgtcaccactccatcgtgctgacggaactctccctcgacactcggctggatcggagttcaagggacgtcatcgagctgaacgtgtgctagaacttggagatgccgtagtttcggtgcttgatcggtcgggccgtgaagacgtacggctacatcaaccacgttgttctaatgcttccgctttcggtctacgagggtacatagacgacacactcccctctcgttgctatgcatcaccatgatcttgcatgtgcgtaggaattttttgaaattactacgtttccctacaggagaggcaggagtgggcgatgatgacggtgatatagcggtccctccagtaaggggcgcacacgacaccccacgtgggggttaggcggcggtgaccagcgagtcgaagatggtggcaaagagggccggggcgtcggcatcgtaggaggagcatccttaaacgaagtagccagccctgatggagtagacccctttaatgacgatgaagcagccgtgacaggtaagcctcaatgagggttcggaggtgtgacggcaatgtccatctgcatgggcaccacaccacccgaggaagtagggttcgaagagttgttggatgatgaagtgggtttggacctcttgcttggatcattggtcctcgctgtatgctccctgtcatgccccttgttgccccctggatcaccgccgtgctcctagactcgaggcacaaagtcactatcagcacggaagtctgattcttcaagactgtaccggaactcataacaattcctttgctccaccatgtctgaagaaagagaagcaattgtgctaattttgaaagcatcaaggttcaatatcgttacctagatacgaaaaattcctctcccgcacaaatagagaagatcaacatcgagagtagcaccaatcaccgagcagactgcccaaagccccaagaagtgtcggagagagtgaggcaccccatgcacatgaacccatataggaattagctcgaaacggtgtggtatcttctctgacttcgaaggcttaaactcgatagtgacattatgggatttgatgaaaactacgaagccagtcaccctttgtagaacctcctcactcggaaaggacatgagaaaagtgtgcttgccatgcggtatggcctcccacatccactgctactagtaatgagcaaatatttatgatttgtttctgttgtaatttagatgtcaaatttttatgattttttttgttcatagaatttttatgatttttttctgttttaattgtgttcatagaattttaatgattttttggtagttcattgattttttgttagatgtgtagttcatagatttttttgttagattttttttcatattgtgtaattaatttgttcatattgtattagattttttatgattttttctgttgtaatttagatgtcaaatttttatgatttggttctgttgtaatttagatgtcaatttttttcacattgtgtaagtaatttagatgtcaaatttttatgatttttttctattcatagaatttttatgatatttttctgttctaattttgttcatagaattttaatgatttttttgtagttcattgatttttttattagatgtgtagttcatagatttttttcatattgtctaattaatttgttcatattctgttagactttttatgatttttttcttttcatagaatttttatgatttttttctgttctaattttgttcatagaattttaatgatttttttgttcatagtattttttttgtcagtttatagtaagtgcttagtagttgaactagttgatttaattaataaaactactttatttaactatatatagaagtagttcccgcatcgacgtcgacgatgcctatcccgcatcctcgttgtcgtcgactcggtggtggtggaggcctgctcgatcagggccatgttcgggactgggctccgccgggctggtattgggaggtgctaccttatgggggacgtaggttggtgaggaggcagcccgttgttgacccgatccttgtttggtggcggtcgcgtgggccagtgacggtgctgaggcttccggtcaccgcggaggtggtacgtcactatgtcagcgaggaggacgagcacgcccgtcactacatggttgcgttggagggaaggttcgacaatacctggcaggttcttcagggatctcactggagctatgatcctgtgatcgttccttatctttaggtgtccaccgcccgcgacgatacccgtcgggcggtacggttctagctgtattttaattagcgatgctatatgtatgatagtattcgaggagtattcgatgatgtatggacacaagagatgatgtacttttggttataattgaatgcatgctaatttgaatactactttattttacgatttggttttgcttattgaatgctcatattggaaaagtactcctactttgactgctaaaattgaagagtactctatgcagaaatctaggagccccctccatcatccacgccgtcgtgggggtagcttctccttcattcccgtgtgctagacaatttgttgtaaaaatgcactcgggaatgaaaggaaaagctacgtaccatcaccgatagtcaacccgtgattaataataatgatctaatttaggttttttagtacatatatttaatatttgaattatgaacttaggccggaaatgtcgtactcggacgacgaaaaccgcccgaggaagtgcgactgaggtatgtgcgacaggttcattgagctggacgaagatcggtgattcagcattaagctcgaggagaccttcgatgttcatacggtacactacgacgacaatagtttttttcgtaattaagcacaacttcaactattttaatgtgtatttttcatcttttccaattcgactagcttatcccatgctatgcaagacgctatgtcttggagaggatgggttttgaagaccatgaaagtatagaaaccaaaaaaattctcctaaggacccatcatggtgtggattttcaagtaaagttgtacaatgctgagagtgtaacccattttggttgcaaaaattgggaagcactttgtaagatgtatggttttgataagggtatgcttgtcaccatggatcttggtgatcctacaatccaacaagacaatatgggcatttgggtccttgtggatacacctccaattcttccccangtgatcctacaatccaacaagacaatatgggcatttgggtccttgtggatacacctccaattcttccccaatgtgagcttaacatagttattaagtaatttatattgtttatttcaaaatagttgacagcttgtttccattgacagcttattttcattcttcaaagaatgtgcggaaaatggtagacaaaacccactacactgatggctccgaattaacttataaggataaaaatcatgtgatcgcattttgtactgatcttgagaattacaatgtctacaatcgaactcctcaacattatggtcaatacgtgccactagtgcacgtgttgaactacggtaactaccatggagataccctgataagattttttactattacgacatccctgcatctttttttaaatacttctaaaactagtacatcatttctaactatgaagttattactatgtttttcaacagataatcccgaatgattgtgtgcctatctgatgtatacgcacggtcaccttgatgttttgaacatacaaccaggttgtcctacgaatctcaattgtccataccggatttctaaaagaagtggagacatgacaatcaaagaatggaaaaaatgtatggacagtcgtaaggagcttcttgcaagcaaaaggaggcgaagcgcaagaattggagacaagatgatctccattcttcataatggagagtcaggttcaatattgttttatgctattttaccttaagggtgtttaggtcctacctgatactgatgaccatgtgctaagaacaattatgtagggttgggttcgatgactatgaggaggatgatcgtatgacttattattaataacgagtagaagttgtacgatgatgcatgattagtaggacttgttattatatatgatgatgtatgatacgagcatgcatgagttattatatatcagcgggtgaaatgaacatagcagtataagagtggacacttctctctattagctagctaataacaacctaaaattaacccccaaaacccctaaaccaacaaaaaaaaattaaaagaaaaacctcaactgctgacacgtggaagccttttggtcccggttcatgtcaccaaccgggaccaaaggcccccttgcctgggctgctcgcagtggccacgtggaggcccatctgtcccggttcgtgttagaaccgggactaaagggtggaggcattagtcacgaccctttagtcccggttcaagaaccgggactaaaggcccttgcgaaccgggactgatgcccccttttctactagtgtttatattttgattgtaatttatatttcaactattgttccactggaatatttccatgctatttatggatgagttgtgttacacctatagttatttggggtgcctcgaagataggaaaaaaccggaccgacatttggtgcacagggttggaacgttggctctcctatcggtatccgcgcatgtttgctgtgtatgtttccgtgttctgcgttcgagctgcccctgtgatatcgatgttttaaagcaaatagataccactactgcaaacgaaacaacgcttatttgtaatttagtgtgtcgaagaggaatataagataactagcacaaatgcatctaaaactgtaacgttattaaatacatcaattcagagggagcttgccatcacagaggaacttctaagcattctcatcgtaaattggtcatggtgctcggcagagagtagcagaatttggtgttgaagtccataaaatatttgtaatatagttttgcttccatccatgagttatgagatacaatcaaactgaagcatgactatgaattggagctaaatttgggggaatgatattatgcggaaattttgaagcggtaaagacgtgataccttagagagagagagagagagagagagcgagagagagagagagagttgtacatatcacatcgcagtggtatagagctattagtgcatcctaatgatgcagaggtcaggggttatcctcatttaagaaaatgttatgagtataataatagggaaatagacaatataaatagtacacacatgttatgattgtagtgatacatcagtacatcatacattgttgttgcatagctagtggtgcagtgatacaccatagatggtgcaaattttgtaagtcgcaaaaactttttcttttgatagaagcccatactgtctccctttctaattacttcaagttctagccttgtcctaagtcaaacttatttaagtctgactttttttctttcgataaaggacttttcattgaatagatatatcgaggtgatacaatcgtattgaaagaaagcccggcctctacatagctagatgcacacagccaaaaagtccagagcaccctaaaaataataattcgatacaatgccaagcaataaatcttgtccagcctaaggagcggtagatcctatccgtanccaaaaagtccagagcaccctaaaaataataattcgatacaatgccaagcaataaatcttgtccagcctaaggagcggtagatcctatccgtaaatcacaccgccatccatggggatagaaaacctccgtcgacgtacactccagccgtgtagacgccatcataaaaaggtccatgtcctccggcttctgcaggatagaccaagtacggagccatcatgtacaaacatgaataacctgcataggagatgagacacatttattgttaaaaaccacatcattcctggtaagccacattgcccagcataaggccgccgctcccacaagaatatgtgcagaaaattctttatcaataccccgcaaccagttgccgaaaatattccttggactacgtggtgggtataaattcgaagctacttggaacatggcccaaactgccagagcgagcttgcactcaaaaaataagtgtttgatagactcgtcatgttggcaaaagacacatgtcttcgaaccatgccagtttcatggtgccagattatctgtagttaggatgactgctttgtttagaaaccagaggaaaatcttcactcttagaggaatttttagcttccacaatttcctgttatctactggaacatcacaatgaaccattgcatcatacatggatttgaccgaaaatttgccattgtgatgcaagttccatcgaaaagtgtctggctcatctgacagttgaatgtcctcnnnnnnnnnnnnnnnnnnnnnnnnnnnnnnnnnnnnnnnnnnnnnnnnnnnnnnnnnnnnnnnnnnnnnnnnnnnnnnnnnnnnnnnnnnnnnnnnnnnnnnnnnnnnnnnnnnnnnnnnnnnnnnnnnnnnnnnnnnnnnnnnnnnnnnnnnnnnnnnnnnnnnnnnnnnnnnnnnnnnnnnnnnnnnnnnnnnnnnnnnnnnnnnnnnnnnnnnnnnnnnnnnnnnnnnnnnnnnnnnnnnnnnnnnnnnnnnnnnnnnnnnnnnnnnnnnnnnnnnnnnnnnnnnnnnnnnnnnnnnnnnnnnnnnnnnnnnnnnnnnnnnnnnnnnnnnnnnnnnnnnnnnnnnnnnnnnnnnnnnnnnnnnnnnnnnnnnnnnnnnnnnnnnnnnnnnnnnnnnnnnnnnnnnnnnnnnnnnnnnnnnnnnnnnnnnnnnnnnnnnnnnnnnnnnnnnnnnnnnnnnnnnnnnnnnnnnnnnnnnnnnnnnnnnnnnnnnnnnnnnnnnnnnnnnnnnnnnnnnnnnnnnnnnnnnnnnnnnnnnnnnnnnnnnnnnnnnnnnnnnnnnnnnnnnnnnnnnnnnnnnnnnnnnngaaaatttgccattgtgatgcaagttccatcgaaaagtgtctggctcatctgacagttgaatgtcctccaggcgagtgagtaattcattccatgctgccagacgagtgcccaaaagatccctacggaaagaaatatcgcggttttcttgtcctaagacttgtttgatcgtgataaatttatgtctgacaatctggtacaagttcggatattgcatcattagtgagttgttccctagccaggtatcttcccagaaacgaacctgagaaccgtccctaaccgagaaggtcccaaattgatagaagaattccttggccttcatgacaccgctccaaaaatgtgaatccccaggtttcctatgaatttgagaaatggcattggatcccacatacttgttgcgaatgatttcctgccatactccattctcggtgagtagtttataaacccacttgctgagaagagcaatgttttaaatctcaaggtcttggattccgaggcccccttgacttttaggtctgcataatacgcttcacctagccagtcgatatttcttgatttcattatcacaatgccacatacgacggaggagatggccaccatcgtcggctgcaccggaaagatcatatctgaccggaggcgccactgaccagatcaccatggcctccacgtcgtcgccgcagatccaacgcatgatggcgcaccgaccgcagccgccgcccttcccggtataggcccgcgccacacctgcagctgccaccgcccgaggcaaggtggccaccacgccgccgcaaccatcgcaaaccgcgccgcaaagtggatcggccgccgagctcgcatcataggcggcgccgccgcgccgcacacgccgccgccaagagttgtcgcctggcgcctcctcgtgatctggccgtctcgcaccggccgtgatgctcgaagggtggagaagtcccgccgccgccctgtcgtcccggctttgcttagcggcactgccgacggtggcgaggagaggggaggggcgggtggggtcgagtggtggcggctaaaacgcggttaagagtttggtttttttagaataaatatttttgatggggacgatgggagcgacgtaaccaaatgaaacaaaactacctacgtactccactttaataggagaaagataattgtatattacttcctccgtcgcatagtgtcaaaaacacttttatattatgagatccacggagtatagagcaccaacaacacttcacggcatccggtaacacgcttgttgggtttccgggtcgttgggacgactgggactgtcttgggctttgcagtgtccttgggtgacgccggctgggttggtgttggtccgtgacagtttcgggctcaggctggaaaaaaggacgcgggcgaggaagaaattgacacggccggctgttggatgggagcacggccggctgttggagttggatgaggactgcactcaagtcaaaccgtttaacctacccttaaccatatctacatcggatataacttggggaaagcgacggggaactccctactatataagctcggccacctacgccccaaacaaatcacaaccaaccttccccaagtcgttagttcccccgagcaatcgagttgtgttcccagcgatcgatcgatctaggtgagcatcatggtttccgccgacgtggcccgcaacatcgtcggcatcatcggcaatgtcatctccttcggccttttcctctcccctgtgtaagcccactcctcctcctctcgtctagtctgtatgtatacatatatgaaaggtggttgctagggcatgaatctgaggctcgttttctaattgtacgtatgtacgcaggccgacgttctggcggatctacaaggccaaggacgtggaggagttcaaaccggacccctacctggcgacgctcatgaactgcctgctctggttcttttacgggctccccatcatccaccccaacagcaccctcgtcctcaccatcaacggcatcggccttgtcattgagggcgcctacatcatcatcttcatcatctacgcggccaagaacacaagggtatgtacgtgcaacccttctaatgcctcctcaatcctcatccgtcccactgtcttttttggctttagtttccttacagaagatcctccagcccctaacccaagctatgtgcatgtgctctgctgtgtgtgcagtggaagatgctcggcgtgctcgcccttgaggcggcgttcgtggctgccgtggcggccggtgtgctcctcggtgcccacacccatgagaagcgctccatgatcgtaggcatcctctgcgtcatcttcggctccatcatgtacgcctccccgctcaccatcatggtacgtacaccaccccaacttaagggtcgtcgacccgtgatctttgataaccgctttaacttgttagttcaggtggctaattaattaatttgcattgtgcacgtatggtgtggtaatgatgcgttttcaagaaaaatacctgcctataatttatttttaaagttctagtggatgcttttgacagaccttaatttgttaagcagtacaccttgtttgttgttgattatgtccatctaaaagctgcacccacctttcatttttttaatgctcgtgccaaaaccctgttaaaaaaagtccgaattgacttttcacctctcacgcacccaaattcttctacaatatgctacatgatatattgttaatcaaaaaagcctacggtttatttctatctcaaaggtaaacttcctttacagggtgaaatacgagctcaggctaattgtaaatgacggatgcttttgccaacttacgagtgtactaatacaaatataactcaaaaagttaagatgaaagtagtaatattgtactgcctatttgcagggtaaagtgatcaggaccaagagtgtggagtacatgccattcttcctgtcgctggtgaacttcctcaatggctgctgctggacggcctatgcgcttatcaagtttgacatctacatcacggtatgtacatacacatacacattggaaataagaagtcgcaaacccagccaaacatacaatcaagaaatcctcagcgcggattgatctaacttttatgtcctctttaaattttgtgcagatccccaatgccctcggtacaatctttggtctcatccagctgatcctgtacttctactactacagatcgacccccaagaagggcaagaatgttgaactgcccactgtcctcaccaaaaacgccgttaccagcggcaccgtctccgtcaccatagagaaataaacgtggcttcgttttttagccctaatgattttgagttgttaataccggatgatacttcaacaacaagttgatgttaatttgtactactttttgttagctagtagagtctgagatcacctttaatttcgtgaaccattgtcgtctgtccgagactactagtgcaaattacaagtgtatataaataccaatccagctgagttatcccagagatatattatgacaccatgtatgcttgcctgttttcaatctgctcctacgtgatgatacgattgaatttttaattacagcgtgcgatggctttgttaaattaaattattcaatatccatgatgtgtttgtattatgtttcgggcaaggtcctattttgttttctgcacaaaaacacccaatgggcttcttattggtgatgcaacttttgaacccggtgtgagaaaaaaaggagaaagacttaacctaattaccggtttggttggatggctcctgctcatttcccgtgacgctgccttgttaccacatcgacaggcaacgagcagctctgcagcttggtcaagtatgacgcttttttctgaatcttgtaacatgttaattgtttgtcatatatatttcaaagcagtgtgtttaatcgcatggtgtctactctatatatagacacacttctttgtcaagaaaaaatagttgagtataggaagagctccgctcaaattagatagcccaccaacttgtgggtctaactattaagacaccagccctttctcacaaatttctattaagggaaataaaaataacatccaacttga

SEQ ID NO: 99 - protein, 245 aa, Triticum aestivum
MVSAEVARNIVSIIGNVISFGLFLSPADVLGIYKAKDVEEFKPDPYLATLMNCLLWFFYGLPIVHPNSTLVLTINGIGLVIEGAYIIIFIIYAAKNTRWKMLGVLALEAAFMAVVVAGVLLGAHTHEKRSMIVGILCVIFGSIMYASPLTIMGKVIRTKSVEYMPFFLSLVNFLNGCCWTGYALIKFDIYITIPNALGTIFGLIQLILYFYYYRLTPKKGKNVELPTVLTKNAVTSGNVSVTIEK

SEQ ID NO: 100 - DNA, 738 bp, Triticum aestivum
atggtttccgccgaagtggcccgcaacatcgtcagcatcatcggcaatgtcatctccttcggcctcttcctctcccctgccgacgttctggggatctacaaggccaaggacgtggaggagttcaaaccggacccctatctggcgacgctcatgaactgcctgctctggttcttttatgggctccccatcgtccaccccaacagcaccctcgtcctcaccatcaacggcatcggcctcgttattgagggcgcctacatcatcatcttcatcatctacgcggccaagaacacaaggtggaagatgctcggcgtgctcgcccttgaggcggcgttcatggctgtcgtggtggctggcgtgctcctcggtgcccacacccatgagaagcgctccatgatcgtaggcatcctctgcgtcatcttcggctccatcatgtacgcctccccgctcaccatcatgggtaaagtgatcaggaccaagagtgtggagtacatgccgttcttcctgtcgctggtgaacttcctcaatggctgctgctggacgggctatgcgctcatcaagtttgacatctacatcacgatccccaatgccctcggtacaatcttcggcctcatccagctgatcctgtacttttactactacagattgacccccaagaagggcaaaaacgtcgaactgcccactgtcctcaccaaaaacgccgttaccagcggcaacgtctccgtcaccatcgaaaaataa

SEQ ID NO: 101 - DNA, 4222 bp, Triticum aestivum
tgacttgacagctccaccgaagctccgtccaagacgaagccgctccaccttctgcctctgtgctccagcgctgctccacaaaagatgctcccaatagagaaacggcgccttagtaccgtcatcgtccgatctggaagaccaaatcctaggtttaccccaaagcagcatgatgggtcgataacagttacacaacgatgtattcatcaaggtaacggcgcaaaacgccaccatcgcctaccaacggctcggttttcaccaacaactatgtcttcccgacttgcagccggagctagatgacggatcttgagatctgaccatccagcgtcaggccgaccacctccgacagaggagatggccaccaccgccggctgcaccggccagatcataccagacccgaggcgccgcctagaccaccatggcctccacgcttttgccgccgatccgacgcccgatggcgcgccgaccgcagccgctgcccttcccggtacaggcctgcgacgtgcctgcatctgccgctgcccgaggcagggccgaccaccacgccgccgcagccaacgccgccacagcgcaaagtggaccggcggccgagctccaaacggagaacaagagttggatttttttagaataaaaattgttgaggggggacgttagggcgtttgatcgatgggggaacgaggtaaccaaacaaaacaaaatgacctacgcactccactttaatagtagaaagataattgtatattactccctccgtcgcatagtgtcgaaaacactcttatattatgagatcgagggagtagagcaccagcaacacttcacggcctccggtaacacgcgtgttgggcttccggagtggttgggacgactgggtcggtcttgggctttgcactgtccatgggtgatgccggctgggtcggtgttggtccgtgacagtttcgcgcccagggttgtccttatttgttttgcgtacgactgtatcgggtttatccgactaggagtattgttacgtggcagaggagctagctcctagctgcgtgatcctttttcgtttggaaaatggacgcgggagaggaagaaattgatacggccggccgttggatgggagcacggccggagaaggagttggatgaggactgcactcaaatcaatccgtttaacctacccttaaccatatccacatcggatataagctcggccacccacgccccaaacaaataacaaccaaccttcctcgagtcgtttgctcccggcgagcaatcgatctagctgagcatcatggtttccgccgaagtggcccgcaacatcgtcagcatcatcggcaatgtcatctccttcggcctcttcctctcccctgtgtaagcccactcctcctctcgtctagtctgtatgtatacatacatgaaaggtggttgctaggtcatgaatctgaggctcgttttctacttgtacgtacgtacgcaggccgacgttctggggatctacaaggccaaggacgtggaggagttcaaaccggacccctatctggcgacgctcatgaactgcctgctctggttcttttatgggctccccatcgtccaccccaacagcaccctcgtcctcaccatcaacggcatcggcctcgttattgagggcgcctacatcatcatcttcatcatctacgcggccaagaacacaagggtacgtacgtgcaaccctcctaatgcctcctcatccggcctaatgtctcttttcgtctttagattctgtatacagaagatcctccagcccctaaccaaagccatgtgcatgtgctctgctgtgtgtgcagtggaagatgctcggcgtgctcgcccttgaggcggcgttcatggctgtcgtggtggctggcgtgctcctcggtgcccacacccatgagaagcgctccatgatcgtaggcatcctctgcgtcatcttcggctccatcatgtacgcctccccgctcaccatcatggtacgtacaccaccccaacttaagggtcgtcgacccgtgatctttgataaccgctttaacttgttagttctggtggctaattaattaatctgcgttgtgcacgtgtggtgcggtaattatgcgctttcaagaaaaaatacctgcctataattaatctgcgttgtgcacgtgtagatgcttttgacagaccttaatttgttaagtagcacaccttgtttgttgttgattctgcttgaaaatctatgtacatctaaaagatgtacccacctttcattttttaacgttcgtgccaaaaccctgttaaaaaatccgaattgagttgttcacctctcacgcacccaagttcttctacagggtgaattactagctcaggctaattgtttttgccaacttaggagtgtactaatactaatattactaaaaaaaataagatgaaagtagtaatattgtactgcctatttgcagggtaaagtgatcaggaccaagagtgtggagtacatgccgttcttcctgtcgctggtgaacttcctcaatggctgctgctggacgggctatgcgctcatcaagtttgacatctacatcacggtatgtacatacacatacacattggaaataagaagtcgcaaacccagccagacatacaatcaagaactcctcagcgcggattgatctaactgttatgtcctctttaaattctgtgcagatccccaatgccctcggtacaatcttcggcctcatccagctgatcctgtacttttactactacagattgacccccaagaagggcaaaaacgtcgaactgcccactgtcctcaccaaaaacgccgttaccagcggcaacgtctccgtcaccatcgaaaaataaacatggcttcgtttttagccctagtgattttgagtagttaataccggatgatacttcaacaagttgatgttaattagtactactttttgttagctagtagagtctgagatcgcctttagtttggtgaaccattgtcgtctgtccgagactaatagtgttatttcaagtgtatataaataccaatccagctgagttatcccagagatgtattatgacaccatgtatgctttcctgttttcaatctgctcttacgtgatgatacgattgattttttaattacagcgtgtgatggctttgttaaattaaattattcaatatccatgatgtgtttgtattatgtttcgggcaaggtcctctttcgtttaatgtacaaaaacacccaaagggcatcttattggtgatgcaacttgaacccggtgtaagagaaaaggagactgacttaacctaattaccggtttgtttggatggctcctgctcttttcccgtgacgctgccttcttaccacatggacaggcaacgagcagctctgcagcttggtcaagtatgacgcttcgagtcgtccctgctagagatatttttctgaatcttgtaacatgttatttgtttctcatatatatatcaaagttgtgtgtttgatcgcatggtgtctactgtatatatagacacacttctttgtcaagaaaaatgagttgactataggaagagctccgctcaaattagataggccaccaacttgtggctataactagtaagactccagccctttcccacaaacttctattaagggaaataaaaatcacatccaacttgaagcagcatccaaactagcagcccaggctagctaaacacatcaactttaggctacatactgtgttttaatatccaagagcaaggtttttttatcaatttattttctttgtatttgaatgatctcgagtcacctagcgataattactatatgaatctagttagattctatttgatcaatgatcacttattataatttgttaggttttcttcctggatcatcattatgtctactagaattaggaaacatgattctggtgctgcaaaacaaagcctggatcttgaggctcgaactcaagagtgccctcgatagatatttagtgagcctgccaacctgattgtgaaaatcaaactgcagatgttaatgttgacgatgggggtgaagataatacaatggtggttgtggaacatgatgcagaaattgatgtcttggagatatgatatagtacgaaggtatgattgaagattatattccaagaaatactagacggatggtcctttttggtagaacacgaggttcgttcattgctttgctatcacattaccattttagcataatatctgatatatggttaaataaggta

SEQ ID NO: 102 - protein, 303 aa, Triticum aestivum
MAGGLFDMSHPASALAGIAGNIVSFFVFLAPMATFLQIYRKKTTGGFSSVPYVVALFSCSLLIFYALLKTKSPLLLTINSFGCCIETVYIIAYLVYAPPRARLRTLAYFFVLDVAAFGLVLVVTMYAFAPAHRVKFLGSVCLAFSMAVFVAPLSIIVKVIKTKSVEFLPVGLSFCLVLSAVAWFCYGLFTKDPFVMYPNVGGFFFSCVQIGLYCWYRKPSNAVLPTTTADAGNGNGGAAEQPQVQVIELPAHSVAILSVGPVPILGVHKIEVMAAEQQTVIDVKDAAEADQPEVIEIVPAPAV

SEQ ID NO: 103 - DNA, 912 bp, Triticum aestivum
atggctgggggcctcttcgacatgtctcacccggcgagcgccctcgccggcatcgcaggaaacatcgtctccttcttcgtgttcctcgcgccaatggcgacgttcctgcagatctacaggaagaagacgacgggcgggttcagctcggtgccgtacgtggtggcgctcttcagctgctcgctgctcatcttctacgcgctgctcaagacgaagtcccccctcctgctcaccatcaacagcttcggctgctgcatcgagaccgtctacatcatcgcctacctcgtctacgcgccgccccgcgccaggctcaggacgctcgcctacttcttcgtcctcgacgtcgccgccttcggcctcgtcctcgtcgtcaccatgtacgccttcgcgccggcccaccgcgtcaagttcctcggcagcgtctgcctcgccttctccatggccgtcttcgtcgcgccgctctccatcatcgtcaaggtgatcaagaccaagagcgtggagttcctgcccgtcggcctctccttctgcctcgtcctcagcgccgtcgcgtggttctgctacggcctcttcaccaaggacccattcgtcatgtacccaaacgtgggcggcttcttcttcagctgcgtccagatcgggctctactgctggtaccgcaagcccagcaacgccgtgctgcccactaccaccgccgacgccggcaacggcaatggcggcgccgcggagcagccgcaggtgcaggtgatcgagctgcccgcgcactccgtcgccatcctgtccgtgggccccgtcccgatcctcggcgtgcacaagatcgaggtcatggcggcagagcagcagaccgtcatcgacgtcaaggacgccgccgaggccgaccagccggaggtcatcgagatcgtccccgcccccgccgtgtga

SEQ ID NO: 104 - DNA, 4889 bp, Triticum aestivum
gtgaatggcttggaaacttttataatgactaattaacaatatcagaggaacaacaaatattgggagtcgaaacaattaatgcagcacatacgagaaggcccttttatatatgtatacataggcatatatattgtttactactccctccgttcacaaatgtaagatgtttcggatatttcaatatggactatatacagactgaaatgagtgaataaacacactaaaatgtatgcctgttttatgaaacataatgagcaatttagttaataaaaatatagttaggatgtgttacattgtaattttgcttatgtgacaatctaggagtctgtccaacatggagcaccgcgagatgcctcacacacatagctacatcattactccattatcaaatgaatctttccctcctgatcacacaaactttccaagaccagacacacgttttcaaaacccattttgcctacgttccaaatgcagcaaacgttcacagaggggagagggagacggagacagagcagttattgaaatagctatcaagtatagttaccaaatgtgtaagtaaatctcagcatcacccaactacatctcctgtagaggtatcactaacaccgcaaccaacatcgtccctcgcaaccagcggagcgtgaagacacaaccggcctgcccgtgtcacatcaactgcaacgctgatgatgcaccagagaaactcatgaaaaaaccaagaaagaaatactcctatctctctctatattaatacagcagtatacaaggtttggagaaattgattttcctttgtatactagacaaagaatgagatggcgtgagttggttattgttgtaagtactactccctccgtaaagaaacataagagtgtttagatcactattttagtgatctaaatgttcttatatttgtttacagagggagcacttaggtacagagacctgggttcaaatcttgagatggtgtttctttcattttccttggcccagccgatcattttgcgttcgttttcaaaactcatttcgcctacgttccaaatgcagcaaaaatgtttcgcagaggggggagggagacggaggcagagtggtagctggtgcgttcacaaggccgggcaggctgatcatgcggccaggagtggctgctcactgtacagcaccagcgcccgcgtctatataagccagcggccgtcgccgaggccaaagcacacaagcagcaggcgcatctcctcgagagctcgcactgatccttgtgtcacccggaaagggagtaggagaggggactcttggcttcgggactagttcttggctgagatcttctccctccctccctccctccctcctttcctctccctcagctgataccttcgctagccagcagtagccgagtcgccgtcgcaatggctgggggcctcttcgacatgtctcacccggcgagcgccctcgccggcatcgcaggtacgcaattcatggagaaaatgcagtttcattctgtgtttgtatgtcatttggcacagcacacctttggtgcttcctctcttccttcttgttgagcagtctgatgtgcatttgtcgcaagatcgatcgtctaggttggctcatgcatgcataggcatagggtagggaagcgcatctccaaaacccaaccacctcccaattctagcaagaacacatccttgaccggttgctgacagacgacacaaacacatttaggcacagatcgatcgatcacacctaaaaggctaagaccccatcaattgtgcgtgcatttcgtagttaatgcatttgtcaccaacagctcaccgtgcactctctgtggatctctctgccaaattccctttcttttcttggaatggcgattggttgagcggcgacggacgcgtgcgtgctctcccctgcaacttccttgccgttggttgcacccgagcactaaataaattaaaaatgaataaatagtaacattccactactaatcataggtgccaaaagaactaattaaaggatgccactgacaaaactaacggcgtcgattttcctcttccttgatctcgtgcaggaaacatcgtctccttcttcgtgttcctcgcgccaatgtaagtatctaaccagctgctaattccttcctatcatgcatgttgttcaagtaatctttgacgtacgcacgccattgatgcatgcatgtggtggtgttgagctgacgatacggtatgggtgcagggcgacgttcctgcagatctacaggaagaagacgacgggcgggttcagctcggtgccgtacgtggtggcgctcttcagctgctcgctgctcatcttctacgcgctgctcaagacgaagtcccccctcctgctcaccatcaacagcttcggctgctgcatcgagaccgtctacatcatcgcctacctcgtctacgcgccgccccgcgccaggctcaggacgctcgcctacttcttcgtcctcgacgtcgccgccttcggcctcgtcctcgtcgtcaccatgtacgccttcgcgccggcccaccgcgtcaagttcctcggcagcgtctgcctcgccttctccatggccgtcttcgtcgcgccgctctccatcatcgtaagccgcctctctcttctgctctgcttcgatcgttttggccggccatgcatggcagttgacatggcaatatggcatgcaggtcaaggtgatcaagaccaagagcgtggagttcctgcccgtcggcctctccttctgcctcgtcctcagcgccgtcgcgtggttctgctacggcctcttcaccaaggacccattcgtcatggtatgccacctagctacttgttcccttaacttggcattgctgccactgccactgatacattgagtgggtggatctctgactccgccatgcgcgcatgcatgcagtacccaaacgtgggcggcttcttcttcagctgcgtccagatcgggctctactgctggtaccgcaagcccagcaacgccgtgctgcccactaccaccgccgacgccggcaacggcaatggcggcgccgcggagcagccgcaggtgcaggtgatcgagctgcccgcgcactccgtcgccatcctgtccgtgggccccgtcccgatcctcggcgtgcacaagatcgaggtcatggcggcagagcagcagaccgtcatcgacgtcaaggacgccgccgaggccgaccagccggaggtcatcgagatcgtccccgcccccgccgtgtgagacaggcttccaccccacccaccccacaaacatcgacgacgacacgacacgagcatgcatgacacgccacacggcatgcatggagatggagaactgatgggtttggttaattagttaattactgagtagtagtatcatcgtactgcagggtgcgcttgcgtgtggattacttactttgttaatttattattactggattgtactgcgtggtgttagttaaattattaccttcaggtgtgtgcctcgatctctcttaatcagtagtagtccgcaggttggtgcggtgacaataataataagacacgacctactacttgtgcatgttgtgacgcatgcatgtgtactggtcattcatgctgtatgttgcagtgagtctctctcgtctcagaccttgcctgattcgtgtcatccatccatcgattcatcaatagactgcaatatgacagtatattaattaattagcttggctgtctctttctacttatactactgtttgctggctcgacctactagtagtgcctactagaagtcggcctaccaaaagcgtaaagcgcaatggttgatcaagcaaacagtggaatctagaacaccagagcttagcacaataaagacaagatttatttcacgacacaccccgcactgaaacaagctccaaggaagcgggcctctactgtctcaaagtgcctgaaaattcacaatcggagcaagatttaaacggtttcttggagcaacccaaaggcagctcttagaaatgtgggtgtaggtttaccgacacgagaagcttgccactagaaacaatcatctcccacctgaccttatcgggttgcaactgcaatgcgatacaaagacatcaaagagagtcttcgacaaaaaatgccatgaacaaagaacagtgagaaagttacacagagacatagatcatgttaagagtctggtcaactgtgacttctttacctccttgtcaacagaggcatgctccttagatccataaacaacttcataatcactgccaaacaaaaataaatagtagcaccaacaccggcttaaaattttacacgcaaaaaaagaaacaccggcttaaaattagcgggcagcagaaagaggacatttgcagaacaacactgcaatttatctgttacattaatttctgatgatacatagtatatagcgtctcaatcctcaaacgggtgacaccgtgaaggcactgcttgatttcagtaattcaaggatttctctgtagggtttgtgttggtcaaaatagccacaacaacaaatgcacacaagttttcagtaaatttttggcatcgaccatttaggtatccctcgtttcacttgcttgtccggcgtggagagctggctatgaggattgcattgggtattcagaaacgagctaacattgatgatatgcatggaaattggaccaggatggtcactaacccctgtctctctcacccctgtctctgggatgggagatggtggtggcttgttgtacatgtgttacagatatttaaatactgtacaagatagtacgaggctctcctgctgccctttgccactcaaaaaaaaaggatggtcgctagacagctgagatcgtagtgggagcagcagctgcttgtagagctatttggctcaataagaatgaagtgacgtccgatcgccaagtcattaacca

SEQ ID NO: 105 - protein, 298 aa, Triticum aestivum
MAGGLFDMSHPASALAGIAGNIVSFFVFLAPMKKTTGGFSSVPYVVALFSCSLLIFYALLKTHSPLLLTINSFGCCIETVYIIAYLVYAPPRARLRTLAYFFVLDVAAFGLVLVVTMYAFAPAHRVKFLGSVCLAFSMAVFVAPLSIIVKVIKTKSVEFLPVGLSFCLVLSAVAWFCYGLFTKDPFVMYPNVGGFFFSCVQIGLYCWYRKPSNAVLPTTTADAGNGNGGSADQPQVQVIELPVHSVAILSVGPVPILGVHKIEVIAAEQQTVIDVKDAAKAAEVDQPEVIEIVPAPAV

SEQ ID NO: 106 - DNA, 897 bp, Triticum aestivum
atggctgggggcctcttcgacatgtctcacccggcgagcgccctcgccggcatcgcaggaaacatcgtctccttcttcgtgttcctcgcgccaatgaagaagacgacgggcgggttcagctcggtgccgtacgtggtggcgctcttcagctgctcgctgctcatcttctacgcgctgctcaagacccactcccccctcctgctcaccatcaacagcttcggctgctgcatcgagaccgtctacatcatcgcctacctcgtctacgcgccgccccgggccaggctcaggacgctcgcctacttcttcgtcctcgacgtcgccgccttcggcctcgtcctcgtcgtcaccatgtacgccttcgcgccggcccaccgcgtcaagttcctcggcagcgtctgcctcgccttctccatggccgtcttcgtcgcgccgctctccatcatcgtcaaggtgatcaagaccaagagcgtggagttcctgcccgtcggcctctccttctgcctcgtcctcagcgctgtcgcctggttctgctacggcctcttcaccaaggacccattcgtcatgtacccgaacgtgggcggcttcttcttcagctgcgtccagattgggctctactgctggtaccgcaagcccagcaacgccgtgctgcccactactaccgccgacgccggcaacggcaatggcggctccgcggaccagccgcaggtgcaggtgatcgagctgcccgtgcactccgtcgccatcctgtccgtgggccccgtcccgatcctcggcgtgcacaagatcgaggtcatcgcagcagagcagcagaccgtcatcgacgtcaaggacgccgccaaggcggccgaggtcgaccagccggaggtcatcgagatcgtccccgcccccgccgtgtga

SEQ ID NO: 107 - DNA, 4870 bp, Triticum aestivum
tatttcaatatagacttatatacagactgaaatgagtgaataaacgcaccaaaacgtatgcctgttttatgaaacacaatgagcgatttaattagtgaaaatatagttaggatgtgttacattgtaattttgcttatgtgacagtctaggagtctgtccagcatggagcaccgcgagatgcctcacacatatatagctacattattactccattatcaaatgaatcttcccctcctgatcacacagctttccaagaccagacacacgttttcaaaactgattttgcctacgtctccaaatgcagcaaacgttcacagaggggagagggagacagagacaggagtagttattggagtaaatagctatcaagtatagttaccaaatgtgtaagtaaatctcaacatcacccaactagatctcctgtatttttttttttttttttgcgagtgaactagatctcctgtagaggtatcactaacaccataaccaacatttcacaaccagcggagcgtttcgtgaagacaccggccctgcctgtgccacatcaactgcaacgctgatgatgcactagagaaactcatgaaaaaaccaagaaagaaatatgggatctctccatattaatacagcagtaaacaaggtttaaagaagctgatctttcagtttccttggcccagccgatgcgtacggtaccaaatcaacgagggaaaacaagaaccggtccggtggtctgtccaccggttttcaacaaaaaaggaaaaaagggtgaactagcggttttcaacagaagtagtaagtacaggatctcaaggtggccgaggagcgaagccgggcgccgtgcgaaggtcgaattgtttgggctttttgtagctatataaaattcttacgctcgatcgccatttacttttcctcgtaaaaataaatgtaccatctttccctctcgatcacacgactttccaagactaaaccacacagacacgttttcaaaactcgtttttgcctacgttccaaatgcagcaaaatgttgacagaggggggaggggagtggtagctgctggtgtgttcacaaggccgggcacgggcaggctgatgaacggatccctggatctggatcgatcatgcggccaggagtggctgctgtactgtacagcaccagcgccgcgcccgtctatataagccagcgcccgtcgccgaggccaaagcacacaagcagcaggcgcatctcctcgagagctcgcactgatccttgtgtcacccggaaagggagtaggagagggggctcttggcttcgggactagttcttggctaagatcttctctctctctctctccctccctcctttcctctccctccagttgataccttcactagctagcagtagccgagtcttcttcgccgtcgtggtcgcaatggctgggggcctcttcgacatgtctcacccggcgagcgccctcgccggcatcgcaggtacgcaattcatggagaaaatgcagtttcattcagtgtttctgtgtcatttggtgcttcctctcttccttcttgttgagcagtctgctgtgcatttatcgcaagatccatcgcctgggttggttcgtgcgtgcatagggtagggaagcgcatctccaaaaccccaccacctcccaattctagcaacaacacatcctcggttgctgacaaacaacagagacacgcacggacacagatcacacctaaaaggctaacccccccatcaattgtgcgtgcatttcctagttaatgcatttgtcaccaacagctcaccatgcactctctatcgatctctctgccaagtcccctttcttttcttggaatggcgattggttgagcggcgacggatgcgtgctctcccctgcaacttccttgccgttggctgcacccgcgcactaaataaattaaaaatgaacattctactactaattataggtgccaaaagaactactaattaaagaatgtgactgacaaaactaacggcgtcgattttcctcttccttgatcgtgcaggaaacatcgtctccttcttcgtgttcctcgcgccaatgtaagtatatatctaaccagctgctaattcattcctatcatgcatgttgttcaagtaatctttgacgtacgtaagtacgccattgatcgatgcatgtggtggtgttcaatcaactgacgatgggtgtcgcgtacgtgcgggtgcagggcgacgttcctgcagatctacaggaagaagacgacgggcgggttcagctcggtgccgtacgtggtggcgctcttcagctgctcgctgctcatcttctacgcgctgctcaagacccactcccccctcctgctcaccatcaacagcttcggctgctgcatcgagaccgtctacatcatcgcctacctcgtctacgcgccgccccgggccaggctcaggacgctcgcctacttcttcgtcctcgacgtcgccgccttcggcctcgtcctcgtcgtcaccatgtacgccttcgcgccggcccaccgcgtcaagttcctcggcagcgtctgcctcgccttctccatggccgtcttcgtcgcgccgctctccatcatcgtaagccgccgtctctcttctcttctgcttccatcgttttggccggccatgcatgacagttgacatggcaatatggcatgcacaggtcaaggtgatcaagaccaagagcgtggagttcctgcccgtcggcctctccttctgcctcgtcctcagcgctgtcgcctggttctgctacggcctcttcaccaaggacccattcgtcatggtatgccacctagtagctacttgttcccttaacttggcattgctgccactgccactgataccttgagtggatggatctctgactctgccatgcgcgcatgcatgcagtacccgaacgtgggcggcttcttcttcagctgcgtccagattgggctctactgctggtaccgcaagcccagcaacgccgtgctgcccactactaccgccgacgccggcaacggcaatggcggctccgcggaccagccgcaggtgcaggtgatcgagctgcccgtgcactccgtcgccatcctgtccgtgggccccgtcccgatcctcggcgtgcacaagatcgaggtcatcgcagcagagcagcagaccgtcatcgacgtcaaggacgccgccaaggcggccgaggtcgaccagccggaggtcatcgagatcgtccccgcccccgccgtgtgagacagacttccaccccacccaaccaacatcgacgacgacacgacacgacacgagcatgcatgatacgccacacgacatgcatggagatggacaactgatgggtttggttaattagttaattattactgagtggtagtatcatcgtactgcagggtgtgcccgcgtgtggattacttactttacttagttaatttattattactggattgtactgcgtggcgttggttaagttattattaccttcaggtgtgtgcctcgatctctcttaatcagtagtattagtccgcaggttggtgtggtgacaataataataagacacgacctactacttgtgcatgttgtgatgcatgcatgtgtactggtcattcatgctgtatgttgcagtctctctcgtctcagaccttgcctgatttgtgtcatccatcaatcgatcagtaaaatagactgcaatatgacagtatattaattattaattggaggttctttcatttactatgattgattagcttggctgtctctttctacttatactgtttactggctcaacctactagcagtgcctactagaagtcggcctaccaaaagcgaaaagtgcaatggttgatcaagcaaacagtggaatctagaacaccacagcttaattagcacaataaagacaagatttatttcacaacacacccatcaacaaacgcactgaaacaagctccaaggaaccgggcctctactgcctcaaagtgcctgaaaattcacaattggagtaagatttaaacggtttcttggagcaacccaaaggcagctcttagaaatgtgggtgtaggtttataaaaacacgagaagcttgccaccagaaacagtcatctcccacctgaccttatcgggttgcaactgcaatgcgatacaaagacatcaaagagagttttccacaaaaaatgccatgaacaaagaaccgtgagaaagctgcggaggcagggatcatgttaagagtccggtcaactgtggtttctctacctccttgtcaacagctagtgtttttgtagacaacggaggcatgctccttagatccataaaccaacttcacaatcactgccaaacaaaaataaatagtagcacaataatgtacaaaaaaaaatctaggagccaccaacaccagcttaaaattagcgggaagcagaaagaggacatttgcacaacaacactgcaatttatctgttacattaatttctgatgatacatatatagcatctcaatcctgaaacgggcgacaccttgaaggcagcagtgcacaaggtatatcacgttgatttcagtaattcaaggatttctctctagggtttgtgttggtcaaaaatagccacaagaacaaatgcacacaagttttcggtaaattttggcatcgaccattgaggtatccattgtttcaattgcttgtccggcgtggagggctggctattaggattgcgctgggtattcagaaacgagctaatattgatcagttttgctagaactcatctagatgagacataatttggtctcattcaccttttatagccattggatgtgatgctataagatgcgtgtgtgctgacgtgggttgtatttgtttttattttcaaagtgaatgagaccaaattatatctcatctagatgagttct

SEQ ID NO: 108 - protein, 195 aa, Triticum aestivum
MNCLLWFFYGLPIVHPNSTLVLTINGIGLVIEGAYIIIFIIYAAKNTRWKMLGVLALEAAFVAAVVAGVLLGAHTHEKRSMIVGILCVIFGSIMYASPLTIMGKVIRTKSVEYMPFFLSLVNFLSGCCWTAYALIKFDIYITIPNALGTIFGLIQLILYFYYYRSTPKKGKNVELPTVLTKNAITSGIVSVTIEK

SEQ ID NO: 109 - DNA, 588 bp, Triticum aestivum
atgaactgcctgctctggttcttttatgggctccccatcgtccaccccaacagcaccctcgtcctcaccatcaacggcatcggcctcgtcattgagggtgcctacatcatcatcttcatcatctacgcggccaagaacacaaggtggaagatgctgggcgtgctcgccctcgaggcggcgttcgtggctgccgtggtggccggcgtgctcctcggtgcccacacccatgagaagcgctccatgatcgtaggcatcctctgcgtcatcttcggctccatcatgtatgcctccccgctcaccatcatgggtaaagtgatcaggaccaagagtgtggagtacatgccattcttcctgtcgctggtgaacttcctcagtggctgctgctggacggcctatgcgcttatcaagtttgacatctacatcacgatccccaatgctctcggtacaatctttggtctcatccagctgatcctgtacttctactactacagatcgacccccaagaagggcaagaatgttgaactgcccactgtcctcaccaaaaacgccattaccagcggcattgtctccgtcaccatagagaaataa

SEQ ID NO: 110 - DNA, 4339 bp, Triticum aestivum
taccgccatcgttcgatctggaagaccagatcttagggtttaccccaagtagcacgagtgggtcgacaacagttacacgacgatgccttcatcaaggtaacggcgcaaatggcagccatcgcccgccaagtgctcggttttcaccggcaactatgtgttcccgactcgcaaccggagcaagatgacagatctggagatatgaccatctagcgtcaggccgaccacatacgacggaggagatggccaccaccgccggctgcaccggtgagatcagatctgaccggacgcgccgctgaccagatcaccatggcctccacgccgtcgcgccgatccaacgaatgatggcacaccgaccgcagccgccgcccttcacggtataggcccgcgccgcgcctgcagctgccaccgcccgaggcagggtggccaccacactgccgcaaccatcaagaccgcgccgcaatgtggatcggccgctgagctcgcatcataggcggcgccaccgcgccgcgcatgcctcctcgcgatatggccgtctcgcatcggccgtgatgctcgaagggtggagaagccccgccgccgccctgccgtcccggctttgcctagcggcactgcggacggtggcgaggagaggggaggggcgggtggggtcgagtggcggcggctaaaacgcggttaagagtttggtttttttagaataaaaattgaggggggcgatggcggagcgacgtaactaaatgaaacaaaactacttacgtactccactttaatagtagaaagataatggtatattactccctccttcgcatatagcgttaaaaacactcttatattatgagatccagggagtagagcacgaacaacacttcacggcatccggtaacacgcgtgttgggcttccggagtcgttgggacgactgggtctgtcttgggctttgcagtgtccttgggtgacgccggctgggttggtgttggtccgtgacaatttcgcgctcagggttgtccttgggtgacgacgcgggcgaggaagaaattgacacggccggccgttggatgggagcacggccggagaaggagttggatgaggactgcaccaaaatcaaaccgtttaacctacccttaaccatatccacatcgcatataacttggggaaggagacagggaaccgcctactatataagctcagccacccacgccccaaacaaatcacaaccaaccttactcaagtcgttagttccccgagcaatcgagttgtgtttccggcgatcgatcgatctaggtgagcatcatggtttccgccaacgtggcccgcaacatcgtcggcatcataggcaatgtcatctccttcggcctcttcctctcccctgtgtaagtcctctcctcctcctctcgtctagtctgtatctgtatgtatgcatatatgaaaggtggttgctgggcattaatctgaggctcgttttctaattgtacgtacgtacgcaggccgacgttctggcggatctacaaggccaaggacgtggaggagttcaagccggacccctagctggcgacgctcatgaactgcctgctctggttcttttatgggctccccatcgtccaccccaacagcaccctcgtcctcaccatcaacggcatcggcctcgtcattgagggtgcctacatcatcatcttcatcatctacgcggccaagaacacaagggtacgtgcaaccctcccaatgcctcctcaatcctcatccgtcccactgtctcttttcagctttagtttctgtacagaagatcctccagctcctaacccaagccatgtgcatgtgctctgctgtgtgtgcagtggaagatgctgggcgtgctcgccctcgaggcggcgttcgtggctgccgtggtggccggcgtgctcctcggtgcccacacccatgagaagcgctccatgatcgtaggcatcctctgcgtcatcttcggctccatcatgtatgcctccccgctcaccatcatggtacgtacaccatcccaacttaagggtcgtcgacccgtgatctttgataaccgctttaacttgttagttcaggttggctaattaattaatctgcattgtgcacgcatggtgtggtaatgatgcgttttcaagaaaaatacctgcctataatttatttttaaagttctagtggatgcttttgacagaccttaatttgttaagtagtacaccttgtttgttgttgattctgcctgaaaatctatgtccatctaaaagatgcacccacctttcaccttttaacgttcgtgccaaaaccctgttataaaaagtacgaattgagttgttcacctctcaagcacccaagttcttctacaatatgctacatcataatttttaatcaaaaaagcctaagttttatttctacctcaaaggtaaacttcctttacagggtgaattactagctcaggctaattgctaattacggatgcttttgccaacttatgagtgtactaatacaaatataactcaaaaagttaagatgaaagtagtaatattgtactgcctatttgcagggtaaagtgatcaggaccaagagtgtggagtacatgccattcttcctgtcgctggtgaacttcctcagtggctgctgctggacggcctatgcgcttatcaagtttgacatctacatcacggtttgtacatacacatacacattggaaataagaagtcgcaaacccagccaaacatacaatcaagaaatcctcagcgcggattgatctaacgtttatgtcctctttaaattctgtgcagatccccaatgctctcggtacaatctttggtctcatccagctgatcctgtacttctactactacagatcgacccccaagaagggcaagaatgttgaactgcccactgtcctcaccaaaaacgccattaccagcggcattgtctccgtcaccatagagaaataaacgtggcttcgttttttagccctaatgattttgagttgttaataccggatgatacttcaacaacaacaagttgatgttaattagtactactttttgttagctagtagagtctgagatcacctttaatttcgtgaaccattgtcgtctgtccgggactactagtgcaaattacaagtgtatataaataccaatccagctgagttatcccagagatatattatgacaccatgtatgcttgcctgttctcaatctgctcctacgtgatgatacgattgaatttttaattacagcatgcgatggctttgttaaattttaaattattcaatatccatgatgtgtttgtattatgtttcgggcaaggtcctattttgttttctgcgcaaaaacacccaatgggcatcttattggtgatgcaacttttgaacccggtgtgagaaaaaaaggagaaggacttaacctaattaccggtttagttggatggctcctgctcttttcccgtgacgctgccttgttaccacatcgacaggcaacgagcagctctgcagcttggtcaagtatgacgcttttttctgaatcttgtaacatgttaattgtttgtcatatatatttcaaagcagtgtgtttaatcgcatggtgtctactgtatatatagacacacttctttgtcaagaaaaaatagttgagtataggaagagctacgctcaaattagatagcccaccaacttgtggctctaactattaagacaccagccctttctcacaaatttttattaagggaaataaaaataacatccaacttgaagcaacatccaaactagcagcccaggctagctaaacacatcaaccatagactacatactgtgttttaatatccaagagcaaggtttttttatcaatttattttctttgtattcgaatgatcacgagtcatctagcgattattactatatgaatctagttagattctgtttgatcaacgataacttattataatttgttaggttttgttcctggatcatcattatgtctactagaattaggaaacatgattttggtgctgcaaaacaaagactggatcttgaggctcgaactcaaacaagtgccctcgatagatatttagtgagcctgccaacttgattcggaaaatcaaactgcagatgttaatgttgatgatggtggtgatgataatacgatggtggttgtggaacatgatgcagaaattgatgtcttggagatatgatataggacgaagatatgattgaagattatattccaagaaatactagacagatggtcctttttggtagaacatgaagtttgttcattgctttcctatcacattacaatttgagcataatatctgatatatggttaaataaggtacaaataaaacagactg

SEQ ID NO: 111 - protein, 247 aa, Triticum aestivum
MVSADAARNIVGIVGNVISFGLFLSPVPTFWRIIKAKDVEEFKPDPYLATLLNCMLWVFYGLPIVHPNSILVVTINGIGLVIESAYLIIFFIYATRNTRLKMLGVLAVEALFMVAVVAGVLLGAHTHEKRSMIVGILCVIFGSVMYASPLTIMGKVIKTRSVEYMPFVLSLVNFLNGCCWTAYALIKFDLYITIPNGLGAVFGLAQLILYGCYYRSTPKKGKNVELPTVKVTKNSVGGGRVSVTVEK

SEQ ID NO: 112 - DNA, 744 bp, Triticum aestivum
atggtttccgccgacgccgcccgcaacatcgtcggcatcgtcggcaatgtcatctccttcgggctcttcctctcccctgtgccgacgttctggcggatcatcaaggccaaggacgtggaggagttcaagccggacccctacctggcgacgctgctcaactgcatgctctgggtcttctacggcctccccatcgtccaccccaacagcatcctcgtcgtcaccatcaacgggatcgggctcgtcatcgagagcgcctacctcatcatattcttcatctacgccaccaggaacacacggttgaagatgctcggcgtgctcgccgtcgaggccttgttcatggtggccgtggtggccggcgtgctcctcggcgcccacacccacgagaagcgctccatgatcgtcggcatcctctgcgtcatcttcggctcggtcatgtacgcctccccgctcaccatcatgggtaaagtgatcaagaccaggagcgtggagtacatgccattcgtcctctccctggtgaacttcctcaacggctgctgctggacggcctatgcgctcatcaagttcgacctctacatcacgatccccaatggactcggtgccgtctttggcctcgcccagctgatcctctacggctgctactacaggtcgactcccaagaaggggaagaatgtcgagctgcctaccgtcaaagtcacaaagaacagcgttggcggcggcagggtctccgtcaccgttgagaaataa

SEQ ID NO: 113 - DNA, 4769 bp, Triticum aestivum
  modified_base (1624)..(1624): a, c, t, g, unknown or other
tcaaggtaacggcgtagaacgccgccatcgcctgccaacggctcgattttcaccggcaaccatgtctccccaactcgcagccgggactagatgatggatctcgagatccgatcaccaagtctttggccggcccttctatctatctggcacgagaaccatgcagaggccggacatgtgcttatagtgattgtattcttttaatgcaatattatgagtcaataaaatccgctctttatcaaaaaatctatttggcacgagaaaagaatttatgcacggtgagcattgcttcagattgtctttcattggtgcaacacctcatacatactcaagaccgctcatctgttggtgcagtggtggtggacattaggcatgtagcattcgacttcgacttgtggtctagaatcacaattgtcggcatattaatgttcctgcttatttgttagctaaatcttatttgagctctatagtagtctttgtgttattctttctgctccggggtgtatctaaaagactatgtaatttgtttacttaattaataaaaaagagtatgtcgatgtttttataaaaaaatcgataatatgttcggattttaagcatggcaacccagacgttttgattttaagcatggcaacccgacaatttttcatgacaactttagaaaatcgccatgttttaccaactaaacttaccacctcgcgccaactaaagttgttatgaaaacgttcaggctgtcatgcttaaagtccgaaagtttgggatttactgggtcagaaaaatgtgcatacatttttagcaattccttgacgtcctgtgagaaagctacttgcttcgaagtagtattatcatctcatagcgaagccgggagcttgaatacactgtgacgcgagcacggcgtccagtcaggatggcaggttactcggttcgttggacttcaactccgatcgaaatttgaacggaggaagagtaactaactcttaaccatatcgtataagagatttaaccaccttccataatatgtttggatttcttccggtacgacaattccagttgaacttggaccgtagggaatatctaactcctaaccatattagagcttacctccatttgtcaaacaaacaaacaaaatcgtagtttacctccacgtcaggaaagccatatccgatagtaactccttacttggggaggacgaacccgccacccacgactatataagctctgcccggcctcccagcttcgatcaccccaaatccccattccccaagtcgtttcctccagtcgagctgtgttcccggcgatcaagatagcaagatggtttccgccgacgccgcccgcaacatcggtcggcatcgtcggcaatgtcatctccttcgggctcttcctctcccctgtgtaagccgccaccctcctcctctcatcccgccgccgccctccgccctccgctggtccaatctaatctatgcatggaaggtggttgccggtgacaaccggggtatggatctgatgcttgtctgtgcaggccgacgttctggcggatcatcaaggccaaggacgtggaggagttcaagccggacccctacctggcgacgctgctcaactgcatgctctgggtcttctacggcctccnatctgatgcttgtctgtgcaggccgacgttctggcggatcatcaaggccaaggacgtggaggagttcaagccggacccctacctggcgacgctgctcaactgcatgctctgggtcttctacggcctccccatcgtccaccccaacagcatcctcgtcgtcaccatcaacgggatcgggctcgtcatcgagagcgcctacctcatcatattcttcatctacgccaccaggaacacacgggtacgtagtagtattgtctcttttcggcgttcatttctctatgtatacaagatctgcccctagctaacccatgcatgccaatgcgcgcgtgcagttgaagatgctcggcgtgctcgccgtcgaggccttgttcatggtggccgtggtggccggcgtgctcctcggcgcccacacccacgagaagcgctccatgatcgtcggcatcctctgcgtcatcttcggctcggtcatgtacgcctccccgctcaccatcatggtacgtgctcgatccatcgcttgatccactcttcaatcctcgatccgtttgtttctatttctatatacggcggcgttgtttactttggaatacaattgatgggaaaggataatgtacacacaccttcctattttaagcatcgtatcaaacctgtctaaacaaacgtgctgcctttttggccaaatcgtcatgatcttcacacaccaagttctttgacaagatgttgccttgcatgcttaattatatgttaggtcaaaacgcatacagtttattcaccacaataggcaacacacagcccgtacgtgtcgtctacttatgtatctgtacttgcatcccgtgtagccagccaaccatgctttctgttgctctcgccaaactcgcgtgttggctgttgagtgacgggaaggatcggaaagaacggttcacgatctaactaaaacctgtgacgatctagcacttcatcagatatgtgtgatgcctagggatgcatgcatatagtgttgtgatctttgcatcttgtgacccttcccttttgccaactctttgaggtggtgatatcctaattaatggaaaaggatacggtaccagccatcaacattggctccatcccgtgggtcatgtggtccaggtgtagagttcaacaatatatagctgctgttaattatccagtgaatatgtttcctcgttaatctacacggtatatatttaatgagacgtgtgcttttacttgctggtgaacgtaatattgtgctgcttgcagggtaaagtgatcaagaccaggagcgtggagtacatgccattcgtcctctccctggtgaacttcctcaacggctgctgctggacggcctatgcgctcatcaagttcgacctctacatcacggtcagtactacaatcgcatcttcgaaacgccagagaaacgagaactccatgcatcgatctaactatcttttgattccgtgcagatccccaatggactcggtgccgtctttggcctcgcccagctgatcctctacggctgctactacaggtcgactcccaagaaggggaagaatgtcgagctgcctaccgtcaaagtcacaaagaacagcgttggcggcggcagggtctccgtcaccgttgagaaataagcttggcttgcagcagtaggcccgccgtcgccaagtgatccaatcaagctggcggcagagatttttagcccgtgatattctgagtagtagttaatttagcacaagatattttgagttagttaattccggatgatggtgccggtatctgttagatagtttgagtgtgcctgtcctttagtttcgtgaaacattctcgtctgccctagtgcaaattcgaagtaactatatactccaattgcaaactatactatatatgggcctgcgtgatatgcatgatatggattgttaattatggcgtgttatgataaaatcaacctttggttggaccggccaacatgaagtgtggtgattaagtattttctaggagtgttatttttgcataatcacatctgctatcttccatccctcaaaaaaaaaaaaaactgctatctcccatagaagcgtgcatacagtctacaaccagcaccttgaatgatttgttgctaaaaaacgataattatgcaaaacaagatttaagccaatagttgtagcaatacacttgagcgtgaaactactcccatcttgttgctcttgctcagacgttcaaaaactgagacctctttattacatgtatatgtttcccttacaatatgatcatctgtccaagctcttttcacaacatgatcttcttctctgagcccgagacttccactaaaaaactcttcatcccatggactagccgatcagaggcatttcagtaataaacccatacagatctttgttgcgttgataaatgatttaatcgaacagggataatatgcttaaagccaaaggtggcaagttggtttaaacccctcttggatggttccttctttagtacagtgagtagttttataaaaatagcactataacatgctgtgcacctgttggagtagaaaggtttgatgtgtagcggcgcgagttaaaagcaaaaaaaagaaagaaaaaaaaaacaccacatttggggtttcacttgcgaaaaactacttggttcctaattatttttaaaagtcaccgcgcattcagtaaacattttgcaaaaagcactgattgagagttttgtctcatttaatcattttctgacaaatgggaccggagtttaaggagtaaactaacaaaaacaattacatagacacccatgaaactaaaatagaaaagcaatccggcctatccctgctccctatccgatcggaggaggcagttctcgtcactcccgtcaccaccaccggatcccgttgtcgctatcggaagcccgtcgccggaagctccgctgtgctcccggagctccccccggctcccgtcacccccactgtctcctgtcgccgttgttagaagctccacccggccttgccgctgtgttgccggagttgcgccgaccgttgagcggtccaccttgcttcctactgctacctgctctcctcgtccttgccatcgcaacagccggccgtgcacctggctcgtccgggcactagcggtgagcagcagcccgggcaccagcggcgagc

SEQ ID NO: 114 - protein, 247 aa, Triticum aestivum
MVSTDAARNIVGIVGNVISFGLFLSPVPTFWRIIKAKDVEEFKPDPYLATLLNCMLWVFYGLPIVHPNSILVVTINGIGLVIESAYLIIFFIYATRNTRLKMLGVLTAEALFMVAVVAGVLLGAHTHEKRSMIVGILCVIFGSVMYASPLTIMGKVIKTRSVEYMPFVLSLVNFLNGCCWTGYALIKFDLYITIPNGLGAIFGLAQLILYGCYYRSTPKKGKNVELPTVKVTKNSVGGGRVSVTVEK

SEQ ID NO: 115 - DNA, 744 bp, Triticum aestivum
atggtttccaccgacgccgcccgcaacatcgtcggcatcgtcggcaatgtcatctccttcgggctcttcctctcccctgtgccgacgttctggcggatcatcaaggccaaggacgtggaggagttcaagccggacccctacctggcgacgctgctcaactgcatgctctgggtcttctacggcctccccatcgtccaccccaacagcatcctcgtcgtcaccatcaacgggatcgggctcgtcatcgagagcgcctacctcatcatcttcttcatctacgccaccaggaacacacggctgaagatgctcggcgtgctcaccgccgaggccttgttcatggtggccgtggtggccggcgtgctccttggcgcccacacccacgagaagcgctccatgatcgtcggcatcctctgcgtcatattcggctcggtcatgtacgcctccccgctcaccatcatgggtaaagtgatcaagaccaggagcgtggagtacatgccattcgtcctctccctggtgaacttcctcaacggctgctgctggacgggctatgccctcatcaagttcgacctctacatcacgatccccaatggcctcggtgcaatcttcggcctcgcccagctgatcctctacggatgctactacaggtcgactcccaagaaggggaagaatgtcgagctgcctaccgtcaaagtcacaaagaacagcgttggcggcggcagggtctcggtcaccgttgagaaataa

SEQ ID NO: 116 - DNA, 4717 bp, Triticum aestivum
  modified_base (1548)..(1548): a, c, t, g, unknown or other
tctctagatcattattacccagagatactcctaattggttcggattttgcacaatctcatcactggtaaaatgcaaaatagaattaaatttgttaacagacataccagtagaaagctcgacgtcacgcagcttggccgccctcagcgcgcacctgagctgcatgtcatcaacatccggctgctcctgcagtctcccgctgacccgtctccctgcagagacaggatccgggatcccaccgaaagtgatgacctcctcgcgagaagctgcgctaggggaagagcctcctgcccgtcccccaatagcggtgaccagcgccgggtccaccggagcctcgtccaacggcgatgagagctcgcagggcctatgggctgccaccccgccgacgcccgcgaccggtaaactcagcctagcgcggtccagggagtccggtgacgcagcaaccgaaccatccagcccgccctccagagcaaccgaagtggaaacgacggcctcctgcgcgcccgctccccctcgaaccggcgacctcaccaaggggggctcgccgacccttggggccgccagcatcaaggtctcagagggccgaacctcctgctggccctctcctcccaaaaccaccggcttggccgcctcagcctgtgtcgaaggagaggacacaaccgatagcgggccatcctgccctgaagcacctccgccatcagcagatctcgacacccgcatactgggcgccatggacgcagaacggaccctgtcacacaacaccctcggcggagccgagaatgctccaaaagagccaaactgaagagcggtagtcggaactgtcctggaagtcccaacaggggcggagtcaccattatccgactgccccgaaggccccttaaccttatcatcatcactcttagctgtatcatcctggttccccgaaccccctccgccctcagaagtgatcatattatcgtatataagagatttaaccaccttccataatctgtttggatttcttccggtacgacaattccagatgaacttggaccgtagggaatatctaactcctaaccatatcagagtttacctccattcgtcaaaaaaaaaatcgtggtttacctccacgtcaggaaagccatatccgatagcaactccttacttggggaggacgaacccgccccccacgactatataagctctgcccggcctccctgtttcgatcaccccgaaccccattccccattccccaagtcgtttcctctagtcgagctgtgttcccggcgatcaagatagcaagatggtttccaccgacgccgcccgcaacatcgtcggcatcgtcggcaatgtcatctccttcgggctcttcctctcccctgtgtaagcctccaccctcttcctctcatcccgtcgccgccgccctccgctggtctaatctaatctgatgcttgtctgtgcaggccgacgttctggcggatcatcaaggccaaggacgtggaggagttcaagccggacccctacctggcgacgctgctcaactgcatgctctgggtcttctacggcctccncttgtctgtgcaggccgacgttctggcggatcatcaaggccaaggacgtggaggagttcaagccggacccctacctggcgacgctgctcaactgcatgctctgggtcttctacggcctccccatcgtccaccccaacagcatcctcgtcgtcaccatcaacgggatcgggctcgtcatcgagagcgcctacctcatcatcttcttcatctacgccaccaggaacacacgggtacgtagtagtactgtctcttttcggcgttcatttctgtatgtatacaagatctgcccctagctaacccatgcatgcccgtgcgtgcgcaagtgcagctgaagatgctcggcgtgctcaccgccgaggccttgttcatggtggccgtggtggccggcgtgctccttggcgcccacacccacgagaagcgctccatgatcgtcggcatcctctgcgtcatattcggctcggtcatgtacgcctccccgctcaccatcatggtacgtggtcgatccatcgcttgatccactcatcaatcctcgatccgtttgtttctatttctatatacggcggcgttgtttactttggaatacaattaatggaaaaggataaggtacacgcaccttcctattttaagcatcctatcaaacctgtctaaacaaacttgctgcctttctggccaaatcgtcatgatcttcgcacacccaagttcttttacatgatgttgccttgcatgcatatatgttaggtcaaaaagcatacagtttattcaccacaataggcaacacacagcccatacgtgtcctctgcttatatatctgtacttgcatcccgtgtagccagccaaccatgcatgctttctgttgctctcgccaaactctcgtgttggctgttgagtgacgggaaggatcggaaagaacggttcacgatctaactaaaaactttcatctagcacttcatcagatatgtgtgatgcctagggatgcatgcatatagtgttgtaatctttgcatcttgtggtccttcccttttgccaactctatgaggtgatgatgttgtaattaatggaaaaggatacggtaccagccagaacattggctccatcccgtgggtcatgggtccaggtggtagagttcaacaatactccagttaattagccagtgaataagtttctcattaatctataccatatacactttatgagacgtgtgcttttactaattaactggtgaacgttatattgtgctgcttgcagggtaaagtgatcaagaccaggagcgtggagtacatgccattcgtcctctccctggtgaacttcctcaacggctgctgctggacgggctatgccctcatcaagttcgacctctacatcacggtcagtactacaatcgcatcttcgaagcgccagagaaacgataactccctgcatcgatctaactacaatgtcctcttttcattccgtgcagatccccaatggcctcggtgcaatcttcggcctcgcccagctgatcctctacggatgctactacaggtcgactcccaagaaggggaagaatgtcgagctgcctaccgtcaaagtcacaaagaacagcgttggcggcggcagggtctcggtcaccgttgagaaataagcttggcttgcagcagcaggccaaccgtcgccaagtgatctaatcaagccggcggcagagaattttagcccgtggtattttgggtagtagttaatttagcacaagatattttgagtagttaattccggatgatggtgctggtatctgttagatagtttgagtgtgcctgtcctttagtttcttgaaacattgtcgtctgccctagtgcaaattcgaagtaactatacactccaattgcaaattataaatatatatgtgcctgagttatcgccatgtttgtcacgcgatctctcatacttttgcgtgatatgcatgatatggcgtgtacgataaaatcgacctttggttggaccggccaacatgacatgcggtgattaagtattttctaggactgttctttttgttgggcctcattgtatctgggtttatccctggcacttggaatccataatcacatctgctatcttccacccctcaaaaaaaaaaatctgctatctcccatagaagcgtgcatacagtctacaagcagcaccttggatgacttgttgctaaaaaacgataattatgcaaaacaagatttaagccaatagttgtagcaatacacttgagggtgaaactactaccatcttgttgtaaatacgttgttgctcttgttcagacattcaaaaattgggacctctttattacatgtatatgtttccattacaatatgatcatttgtccaagctcttttcacaacatgatcttcttctctgagcccaaaaccttcactaaaaaactcttcatcctatggactagcccatcagaggcatttcagtaataaacccatatacagatcttcgttgtgttgataaacgatctaatccaacataaataacatgcttaaaaccaaaggtggcaagttggtttaaacctcattactgccatccgcttctccccatccccttaccgctctcactcccttctccccatccccttaaagcatctccagccgttcggccccccagagcgtcaaaaaagagcggtctggggacgaaccggcgctagattggcccctggggttcggttcgctcccagtcataggcccacggtcgccgcgagttcggcgaagttcgtttcatattttttgcaaactcggcgacttttgcaggaactcggccatacttcgtcaaaatttgtacaaacatgcaagaactacgcctaacttaaaaaacaactaaaaagtctagtcgccgccgtcgccgccgccgtcgtctacatgccgagaagcgggtgtagtcgtcgtcgtcatcgtcgccgccgcgcgcctcgcctgcggcgtccctgctacagccctggtcggggtctccgacacgtggtggggcgcttgacggcccggcctcgccctcgtcgtcgctgtcgatgacaataacgccgccctcctcggcgcggctacgggcctgggtctccaggtacgcccggcgctggcggcgcacctgctcgcggacgtagtcctccttcgcccatttgagggcggactcgtcgtcgggggccaccatgtcgacgtga

SEQ ID NO: 117 - protein, 247 aa, Triticum aestivum
MVSADAARNIVGIVGNVISFGLFLSPVPTFWRIIKAKDVEEFKPDPYLATLLNCMLWVFYGLPIVHPNSILVVTINGIGLVIESAYLIIFFIYATRNTRLKMLGVLAVEALFMVGVVAGVLLGAHTHEKRSMIVGILCVIFGSVMYASPLTIMGKVIKTRSVEYMPFVLSLVNFLNGCCWTGYALIKFDLYITIPNGLGAVFGLAQLILYGCYYRSTPKKGKNVELPTVKVTKNSVGGGRVSVTVEK

SEQ ID NO: 118 - DNA, 744 bp, Triticum aestivum
atggtttccgccgacgccgcccgcaacatcgtcggcatcgtcggcaatgtcatctccttcgggctcttcctctcccctgtgccgacgttctggcggatcatcaaggccaaggacgtggaggagttcaagccggacccctacctggcgaccctgctcaactgcatgctctgggtcttctatggcctccccatcgtccaccccaacagcatcctcgtcgtcaccatcaacgggatcgggctcgtcatcgagagcgcctacctcatcatcttcttcatctacgccaccaggaacacacggctgaagatgctcggcgtgctcgccgtcgaggccctgttcatggtgggcgtggtggccggcgtgctcctcggcgcccacacccacgagaagcgctccatgatcgtcggcatcctctgcgtcatcttcggctcggtcatgtacgcctccccgctcaccatcatgggtaaagtgatcaagactaggagcgtggagtacatgccattcgtcctctccctagtgaacttcctcaacggctgctgctggacgggctatgcgctcatcaagttcgacctctacatcacgatccccaatggcctcggtgccgtctttggcctcgcccagctgatcctctacggctgctactacaggtcgactcccaagaagggcaagaatgtcgagctgcctaccgtcaaagtcacaaagaacagcgttggcggcggcagggtctccgtcaccgttgagaaataa

SEQ ID NO: 119 - DNA, 4608 bp, Triticum aestivum
ggtacaagtttacaaggctggttgcacgtatataaatagcactagcagctaactagaccaatcttactcggaggctagctccagcactattcggatacgtacatacattagcaacttggacacgtatcaatattgggaggttgtgttcgtgtttaattccaacagaggtgagcaggcaggcggcggcgctggcctccccatggcacggagctgagcaagcatgcggcggcgctccccatggcgtggtggtggccggctctggcgccggcggccgtggctgcgggcagccgtggtggtgccggccatggctggggaaagacatcagggaagaagatggagaaaagaaaaataagggagagagagagtgggcgcttacatatgggacccatatgtacattaacggttaaacaaacagtcaataaacggtttgtttagaagggcccaacatgtcataaaccggattaattctaaattgcatgatcatttgggttttttagaacagcgaaccaaaaaatttgtaggtttttgaaatatcatgaaaggtgatagttttttattgacctagcctataatgtggtagttttttgctatatactcgagaaaacaccgagcgcaaaaaaacgctattttgattatgtataattattttagcgcgccgcgcaaccccgcgctttttggagatgctcttaagcaattggttagagatgctcttacgttgttgggagagctcgtgcaacgtacgtgcatttttagcaatcccttgccgtcgcatgatagagctcgtgcaaactttcttcgaagtatatcatctcatagcgaagccgggagcttgaatacactcgtgacgcgagcacggcgtccagtcaggatcgcaggttgctcagttcgttggacttcaactccgatcgaaatttgaacggaggaagagtaaccaactcttaaccatatcgtataagagatttaaccaccttccataatctgtttggatttcttccggtacgacaattcatgttgaacttggaccgtagggaatatctaactcctagccatatcagagcttacctccatttgtcaaacaaacaaaaaaaatcgtattttacctccacgtcaggaaagccatatccgatagtaactccttacttggggaggacgaacccgccacccacgactatataagctctgcccggcctccctgtttcaatcaccccgaaccccattccccattccccattccccattccccattccccaagtcgtttcctccagtcgagctgtgttcccggcgatcaagatagcaagatggtttccgccgacgccgcccgcaacatcgtcggcatcgtcggcaatgtcatctccttcgggctcttcctctcccctgtgtaagccgccaccctcctctcgtcccgctgccgccgcccgccgctggtctaatctaatctatgcatggaaagtagttgccggtaacaactggggtatggatctgatgcttgtctgtgcaggccgacgttctggcggatcatcaaggccaaggacgtggaggagttcaagccggacccctacctggcgaccctgctcaactgcatgctctgggtcttctatggcctccccatcgtccaccccaacagcatcctcgtcgtcaccatcaacgggatcgggctcgtcatcgagagcgcctacctcatcatcttcttcatctacgccaccaggaacacacgggtacgtagtatttctgtctcttttcggcgttcatttctgtatgtatacaagatcagcccctagctaacccatgcatgcccgtgcgtgcgcaagtgcagctgaagatgctcggcgtgctcgccgtcgaggccctgttcatggtgggcgtggtggccggcgtgctcctcggcgcccacacccacgagaagcgctccatgatcgtcggcatcctctgcgtcatcttcggctcggtcatgtacgcctccccgctcaccatcatggtacgtgctcgatccatcgcttgatccactcttcaatcctcgatccgtttgtttctatttctatatacggcggcgttgtttactttggaatacaattaatgggaaaggataatgtacacgcaccttcctattttaagcatcgtatcaaacctgtctaaacaaacgtgctgcctttttggacaaatcgtcatgatcttcacacacccaatttcttttacatgatgctgccttgcatgtatgttaggtcaaaaagcatacagtttattcaccacaataggtatcacacagcccagacgtgtcctctgcttatgtatatttgcatcccgtgtagccagccaaccatgctttctgttgctctcgccaaactctcgtgttggctgttgagtgacgggaaggatcggaaagaacggttcacgacctgtgatctagcacttcatcagatatgtgtgatgcctagggatgggatgcatgcctatagtgttgtaatctttgcatcttgtgatccttcccttttgcaactctatgaggtgatgatatccttattaatgagaaagggatacggtaccagccaccaacattggctccatcccgtgggtcatgcagtccaggtgtagagctcaacaatatatggctgctgttaattagccagtgaatatgtttcctcattaatctataccatatatatacttaatgagacgtgtgcttttactaactggtgaacgtaatattgtgctgcttgcagggtaaagtgatcaagactaggagcgtggagtacatgccattcgtcctctccctagtgaacttcctcaacggctgctgctggacgggctatgcgctcatcaagttcgacctctacatcacggtcagtactacaatcgcatcttcgaaacgccagagaaacgatatctccatgcatcgatctaactatcttttgattccgtgcagatccccaatggcctcggtgccgtctttggcctcgcccagctgatcctctacggctgctactacaggtcgactcccaagaagggcaagaatgtcgagctgcctaccgtcaaagtcacaaagaacagcgttggcggcggcagggtctccgtcaccgttgagaaataagcttggcttgcagcagcaggcccgccgtcgccaagtgatccaatcaagcctgcggcagagatttttagcccgtgatattttgagtagtagttaatttagcacaagatattttgagtagttaattccggatgatggtgccggtatctgttagatagtttgagtgtgcctgttctttagtttcgtgaaacattctcgtctgccctagtgcaaattcgaagtaactatatactccaattgcaaattatactatatatgtgcctgcgtgatatgcatgatatggattgttaattatggcatgttacgataaaatcgacctttggttggaccggccaacatgaagtgtggtgattaagtattttctaggagtgttctttttgttgggcctcattgtatctgggtttatccctggcacttggagtccataattacatctgctatcttccatccctaaaaaaaaatctgctatctcccatagaagcgtgcatacagtctacaaccagcaccttgaatgatttgttgctaaaaaacgataattatgcaaaacaagatttaagccaatagttgtagcaatacacttgagcgtgaaactactcccatcttgttgctcttgctcagacgttcaaaaactgagacctctttattacatgtatatgtttcccttacaatatgatcctttgtccaagctcttttcacaacatgatcttcttctctgagcccgagacttccactaaaaaactcttcatcccatggactagccgatcagaggcatttcagtaataaacccatacagatctttgttgcgttgataaatgatttataatcgagcagggataatatgcttaaaaccaaaggtggcaagttggtttaaacccctcttggatggttccttctttagtatagtgagtagttttatattggaataaaaatggcactataacatgctgtgcacctgttggagtagaaaggtttgatgtgtggcggtgcgagttaaaagcaaaaaaccaccacatttggggcttcacttgcgaaaaactacttggttcctagttattttcaaaagtcaccgcgcattcagtaaatattttgcaaaaagcactgattgggggttttgtctcatttgatcactttctgacaagtgggactggagtttaaggagtaaactaacaaaaacaattacatagacgcccatgaaactaaaatagaaaagcaatccggcctatccctgctccctatccgatcggaggaggcagttctcgccactcccgtcaccaccatcggatcccgttgtcgctgccggaagcccgtcgccggaagctccgcccagccctgtcgctgtgctcccggagctccccccggctcctgtcacccccaccggctcccgtcgccgttgttagaagctccacccggccttgccgctgtgttgcctgagttgcgccgaccgttgagcagtctgcctcgcttcctactgctgcctgctctcctcgtccttgccatggcaacagctggccgtgcacttggctcg

SEQ ID NO: 120 - protein, 588 aa, Triticum aestivum
MPSSPAQMALGRARSPALVLAAAVLGALCVVALSEDEQLENLRFVQHAQDAPLVSHYNYIVVGGGTSGCPLAATLSEHSRVLLLERGGLPYRNMSNQEHFTDALADTSLASPAQRFVSTDGVVNARARVLGGGSCLNAGFYTRASNEYVRTAGWDAGLVNSSYRWVERALVFRPDVPPWQAALRDALLEAGVTPDNGFTFDHVTGTKIGGTIFDNNGQRHTAADFLRHARPRGLTVVLYATVSRVLFRSQEGVPYPVAYGVVFADPLGVQHRVYLRDGGKNEVILSAGTLGSPQLLMLSGVGPQVHLEAHGIQVLVDQPMVGQGVADNPMNSVFIPSPVPVGLSLVQVVGITKSGSFIEGVSGSEFGIPVSDGARRLASFGLFSPQTGQLGTLPPGQRTPEALQRAAEAMRRLDRRAFRGGFILEKILGPVSTGHIELRSTDPRANPAVTFNYFQEAEDLERCVRGIQTIERVIQSRAFSNFTYANTTVESIFTDSANFPVNLLPRHVNDSRSPEQYCRETVMTIWHYHGGCHVGAVVDDNYRVFGVRGLRVIDSSTFRYSPGTNPQATVMMLGRYMGIKIQAERWRK

SEQ ID NO: 121 - DNA, 1767 bp, Triticum aestivum
atgccgagctcgccggcgcaaatggcacttggccgcgcgagatcgccggcgctggtgctcgccgccgccgtccttggcgcgctctgcgtcgtcgcgctctcggaggatgagcaactggagaacctgcggttcgtgcagcacgcgcaggacgcgccgctggtgtcgcactacaactacatcgtggtgggcggcggcacgtccgggtgcccgctggcggcgacgctgtcggagcactcgcgggtgctgctgctggagcgcgggggcctcccctaccgcaacatgtccaaccaggagcacttcacggacgcgctggccgacacgtcgctggcgtccccggcgcagcggttcgtgtccacggacggcgtggtgaacgcgcgggcgcgggtgctgggcggcgggagctgcctcaacgccgggttctacacgcgggccagcaacgagtacgtgcgcacggccgggtgggacgccggcctcgtcaactcgtcgtaccggtgggtggagcgcgcgctggtgttccgcccggacgtgccgccgtggcaggccgcgctccgggacgcgctgctggaggccggcgtcacccccgacaacggcttcaccttcgaccacgtcacggggaccaagatcggcggcaccatcttcgacaacaacgggcagcgccacacggccgccgacttcctccggcacgcccggccgcgggggctcaccgtggtgctctacgccacggtgtcgcgggtcctgttcaggagccaggagggggtgccgtacccggtggcgtacggggtggtgttcgcggacccgctgggggtgcagcaccgggtgtacctccgggacgggggcaagaacgaggtgatcctgtcggcggggacgctggggagcccgcagctgctgatgctgagcggcgtgggcccgcaggtgcacctggaggcgcacggcatccaggtgctggtggaccagcccatggtcgggcagggcgtggccgacaaccccatgaactcggtcttcatcccgtcgccggtgccggtggggctgtccctggtgcaggtcgtcgggatcaccaagtccggcagcttcatcgagggcgtgagcggctccgagttcggcatcccggtgtccgacggcgcccgccggctggccagcttcgggctcttctccccgcagaccgggcaactcggcacgctgccgccggggcagaggacgccggaggcgctgcagcgcgcggcggaggcgatgcggcggctggacaggcgggcgttccggggcggcttcatcctggagaagatcctggggccggtgtcgacggggcacatcgagctgcgcagcaccgacccgcgcgccaacccggccgtgaccttcaactacttccaggaggcggaggacctggagcggtgcgtccgggggatccagacgatcgagcgggtgatccagtcgcgcgccttctccaacttcacctacgccaacaccaccgtggagtccatcttcaccgactcggccaacttccccgtcaacctgctgccgcgccacgtcaacgactcccgctcgccggagcagtactgcagggagaccgtcatgaccatctggcactaccacggcgggtgccacgtcggcgccgtcgtcgacgacaactaccgggtgttcggggtcagggggctcagggtcatcgacagctccaccttcaggtactcccccggcaccaacccgcaggccaccgtcatgatgctcggcaggtatatgggcataaagattcaggccgagagatggaggaaatga

SEQ ID NO: 122 - DNA, 4650 bp, Triticum aestivum
tgaccacccgcggctggctccctggggcgctccgggccattgatctaggcagccgcctcgcacctggactgcttgcctctgggtccatgacgaggggtgcgggtgcagtcggatccatcgtgatgtggtgttttcggtcacaccagtttgtgccctcttgttgattgccctgtgcgtgatgggctgaccggatctgcctgttagtgttgtgttggccacccgcggctggctccttggggcgctccaggtcatcgatctaggcggtcgcctcgcacccggactgcttgcctctgggtccatgacgagaggatgcgggcgcggtcggatccatcatgatgtggtgttttcggtcacaccagtttgtgctctcttgttggttgtcctgcgcgtgatgggccgaccggatctgcctgtcagtgttgtgttggccacccgcggctggctccctggggcgctccgggctatcgatctaggcgtccgcctcgcacccggactgcttgcctctgggtccatgacaagggggtgcgggcgcggtcggatccatcatgatgtggtgttttcggtcacacaagtttatgccctcttgttggttgatctgcgcgtgatgggacgactagatctgcctgtcagtgttgtgttggccacccgcggctggctccatggggcgctccgcgccatcgatctagggggccgcctcgcatccagactgcttcaggaactgacatccgttcatttattttgtcagttcatttatttgaggcaaatttcttcaggaactgacatccgttccatggggcgtacgttggggattggtttctggcgaacgttcgccagattatctttaccgcttttttttagtttctaggtttttcttggtattttattattttcttatagtttggaccgatctcctcacgtcatagttttgccttggtacctgtaatatgtatttgtgcttgtatataaaaatggagggagtatagttttttcgggagaaatatagtgcacgcgcaaaaccgtctcaagatcggccagtaaaccctcccccttgctgcttcatcgcatttgatatgatatactcaacagctcctcccgtctaaaaagaaagttcatcacttctgcatttcacaaccgatgcattccatttgatataaccattccctttctatactgacacaagtttatggggctgttctttgcactgcaaccgcctccgcattatttaacacatctaccctcgatctacccgcgcgctaactcgaggtttataaaccaagcgaacttttcgcgtccctgaagcgcaaaggatgccgagctcgccggcgcaaatggcacttggccgcgcgagatcgccggcgctggtgctcgccgccgccgtccttggcgcgctctgcgtcgtcgcgctctcggaggatggtgcgtgtgttcggggttttgcatgtcagctagtacggagtacgtgcctgtgtctgttatcatgatcaatgaccgatggtggcgtgcgtgtgcagagcaactggagaacctgcggttcgtgcagcacgcgcaggacgcgccgctggtgtcgcactacaactacatcgtggtgggcggcggcacgtccgggtgcccgctggcggcgacgctgtcggagcactcgcgggtgctgctgctggagcgcgggggcctcccctaccgcaacatgtccaaccaggagcacttcacggacgcgctggccgacacgtcgctggcgtccccggcgcagcggttcgtgtccacggacggcgtggtgaacgcgcgggcgcgggtgctgggcggcgggagctgcctcaacgccgggttctacacgcgggccagcaacgagtacgtgcgcacggccgggtgggacgccggcctcgtcaactcgtcgtaccggtgggtggagcgcgcgctggtgttccgcccggacgtgccgccgtggcaggccgcgctccgggacgcgctgctggaggccggcgtcacccccgacaacggcttcaccttcgaccacgtcacggggaccaagatcggcggcaccatcttcgacaacaacgggcagcgccacacggccgccgacttcctccggcacgcccggccgcgggggctcaccgtggtgctctacgccacggtgtcgcgggtcctgttcaggagccaggagggggtgccgtacccggtggcgtacggggtggtgttcgcggacccgctgggggtgcagcaccgggtgtacctccgggacgggggcaagaacgaggtgatcctgtcggcggggacgctggggagcccgcagctgctgatgctgagcggcgtgggcccgcaggtgcacctggaggcgcacggcatccaggtgctggtggaccagcccatggtcgggcagggcgtggccgacaaccccatgaactcggtcttcatcccgtcgccggtgccggtggggctgtccctggtgcaggtcgtcgggatcaccaagtccggcagcttcatcgagggcgtgagcggctccgagttcggcatcccggtgtccgacggcgcccgccggctggccagcttcgggctcttctccccgcagaccgggcaactcggcacgctgccgccggggcagaggacgccggaggcgctgcagcgcgcggcggaggcgatgcggcggctggacaggcgggcgttccggggcggcttcatcctggagaagatcctggggccggtgtcgacggggcacatcgagctgcgcagcaccgacccgcgcgccaacccggccgtgaccttcaactacttccaggaggcggaggacctggagcggtgcgtccgggggatccagacgatcgagcgggtgatccagtcgcgcgccttctccaacttcacctacgccaacaccaccgtggagtccatcttcaccgactcggccaacttccccgtcaacctgctgccgcgccacgtcaacgactcccgctcgccggagcagtactgcagggagaccgtcatgaccatctggcactaccacggcgggtgccacgtcggcgccgtcgtcgacgacaactaccgggtgttcggggtcagggggctcagggtcatcgacagctccaccttcaggtactcccccggcaccaacccgcaggccaccgtcatgatgctcggcaggtaaacgcaactctcaaatcacccccgcaattatactgatctgaatgaactcaactaacacaactgttgtaaatctgtacaggtatatgggcataaagattcaggccgagagatggaggaaatgatatttcaaggagccatatttgaatgtaattcatggcataatattgtatttggggaacctggtttagacagattaatttgtttttttccacttattctctaggcatagtcttttagtgcctgtttgttgattattatgaaacccagtcatccctttaacatgcatttctctgcattgcaaaataagaaggaaaaacttatgttgcaaaggcatgacggtggttcaagcaacaatacttcgatcaaaaaaattggaaaccggttgccacatccacctaccaatttccattgataacaagagtagcaaaccagaatactgtgcaggatgcatttacagttttgtactagaaacttaatttcatgaaattacataccactattttacttggtggttgttacatgctacaaacgccaggttcccttcagagggatccagcaagccatcatcttatctatacagggaccgagtacatgtcaaaggaacatgatgagttaagaatggaacagccaaaggcagaaatgacttgaacattttttttccttgtttccaacttgccctacttgcctgctacctatatattggcttgcgaaattctctccctacctatgttatcaggaaccagaaaatgctacttcggcatctctgttgtccagaatacccaagaagtcaccaacaattgcatgcttgcataagaataattcatatagtgaggttttcttggatggccgtgaaggagccacaaatgtttccgcccatgtctgggaatgtcgcacatcctggcaagggtttcaccttgcctttacggtcaacacttacagggtacttgaggaggtggcctctcatctcagtcacctcatttgcaaagaactgatcccagttatgttgcccgagttgacgaacccgcctcatgcactctaggctctctggatggttaaactcttcctcgataattccaatatgctcagcccagagggacattctgtagccataaatctacataaaaaatcaccaaacttgatttaagagtataatccagaaataccagctgcgtcataactagattattaccctaagagatgagatgatataccccgacaacctttttcacttgctgttttagaatgcacatattagtatttatattcacataactgtacttgtagaattgccaccaacagtatttatgtgtcattacatgtctatagtttagtgtatatataattgaaaaaaaggtaaatgttaaatgggtgtagttggaggcagtctctctaaataaggtgaaacaattgtaatgaagcagcagttctaagcaacgcataacatcaggaagacaagtacaaaatctgcaggcacaatctcaaaatgcaagctcatgaaaacacctgtcttctgcaggtacc

SEQ ID NO: 123 - protein, 588 aa, Triticum aestivum
MPSSPAQMALGRARSPALVLAAAVLGALCIVALSEDEQLENLRFVQHAQDAPLVSHYNYIVVGGGTSGCPLAATLSEHSRVLLLERGGLPYRNMSNQEHFTDALADTSLASPAQRFISTDGVVNARARVLGGGSCLNAGFYTRASNEYVRTAGWDAGLVNSSYRWVERALVFRPDVPPWQAALRDALLEAGVTPDNGFTFDHVTGTKIGGTIFDNNGQRHTAADFLRHARPRGLTVVLYATVSRILFRSQEGVPYPVAYGVVFADPLGVQHRVYLRDGGKNEVILSAGTLGSPQLLMLSGVGPQAHLEAHGIQVLVDQPMVGQGVADNPMNSVFIPSPVPVGLSLVQVVGITKSGSFIEGVSGSEFGIPVSDGARRLASFGLFSPQTGQLGTLPPGQRTPEALQRAAEAMRRLDRRAFRGGFILEKILGPVSTGHIELRSTDPRANPAVTFNYFQEAEDLERCVRGIQTIERVIQSRAFSNFTYANTTVESIFTDSANFPVNLLPRHVNDSRSPEQYCRETVMTIWHYHGGCHVGAVVDDNYRVFGVRGLRVIDSSTFRYSPGTNPQATVMMLGRYMGIKIQAERWRK

SEQ ID NO: 124 - DNA, 1767 bp, Triticum aestivum
atgccgagctcgccggcgcaaatggcacttggccgcgcgagatcaccggcgctggtgctcgccgccgccgttcttggcgcgctctgcatcgtcgcactctcggaggatgagcaactggagaacctgcggttcgtgcagcacgcgcaggacgcgccgctggtgtcgcactacaactacatcgtggtcggcggcggcacgtccgggtgcccgctggcggcgacgctgtcggagcactcgcgggtgctcctgctggagcgcgggggcctcccctaccgcaacatgtcgaaccaggagcacttcacggacgcgctggccgacacgtcgctggcgtccccggcccagcggttcatctccacggacggcgtggtgaacgcgcgggcgcgggtgctgggcggcgggagctgcctcaacgccggattctacacgcgggccagcaacgagtacgtgcgcacggccgggtgggacgccggcctcgtgaactcgtcgtatcggtgggtggagcgcgcgctggtgttccgccccgacgtgccgccgtggcaggccgcgctccgggacgcgctgctcgaggccggcgtcacccccgacaacggcttcaccttcgatcacgtcacggggaccaagatcggcggcaccatcttcgacaacaacgggcagcgccacacggccgccgacttcctccggcacgcccggccccgggggctcaccgtcgtgctctacgccacggtgtcccggatcctgttcagaagccaggagggggtgccgtatccggtggcgtacggggtggtgttcgcggacccgctgggggtgcagcaccgggtgtacctccgggacggggggaagaacgaggtgatactgtcggcggggacgctggggagcccgcagctgctgatgctgagcggcgtcggcccgcaggcgcacctcgaggcacacggcatccaggtgctggtggaccagcccatggtcgggcagggcgtggccgacaaccccatgaactcggtcttcatcccgtcgccggtgccggtggggctctccctggtgcaggtcgtcgggatcaccaagtccggcagcttcatcgagggcgtgagcggctccgagttcggcatcccggtctccgacggcgcccgccgcctggccagcttcggcctcttctccccccagaccgggcagctcggcacgctgccgccggggcagaggacgccggaggcgctgcagcgcgcggcggaggcgatgaggcggctggacaggcgggcgttccggggcgggttcatcctggagaagatcctggggccggtgtccacgggccacatcgagctgcgcagcaccgacccgcgcgcgaacccggcggtgacgttcaactacttccaggaggcggaggacctggagcggtgcgtccgggggatccagacgatcgagcgggtgatccagtcgcgcgccttctccaacttcacctacgccaacaccaccgtcgagtccatcttcaccgactcggccaacttccccgtcaacctgctgccgcggcacgtcaacgactcccgctcgccggagcagtactgcagggagaccgtcatgaccatctggcactaccacggcggatgccacgtcggcgccgtcgtcgacgacaactaccgggtgttcggggtgagggggctcagggtgatcgacagctccaccttcaggtactcccccggcaccaacccgcaggccaccgtcatgatgctcggcaggtatatgggcataaagattcaggccgagagatggaggaaatga

SEQ ID NO: 125 - DNA, 4649 bp, Triticum aestivum
ggtacgtgatctccggcatggcaacatagtagagattgctcaccggtttttgcaaatgtggagaaagattcagggtgcaggcattgttctctcctccaacgaggaccggatcagctgggtggcaaccagaggaggaggaagctactcggctaaggctgcttacgatctacaaatcagtgacattcctccttcaggaggcaaagctgcgatttggagggcttgggcgccaggcacggtgaagatcttcgcctggctgctccaccaggacaagctttggtgcaacgatcgcctgcaacggcgagggtggcccaatgggtatttttgcgtatgctgcaacagaaatctggaaagctcaatacaccttttctgggactgcccttttgcccgatctgtctggccggcagtgtcgcgtagatatggttgcgctgtgctcaaagaagcgcgggacgcaggtcacagttccctcagacattgggaaagactgaccgcactaacgcctcaaagttgcagaaaagggctaaggtcgatgctgttgctgatcacttgggagttttggaaagagaggaacgcgtgtgtatttagaggaaaaacgccccagacggaggatgttcagcgagccatcaagaacacgatggagctctggcgggcagcaggagctcgatgcattgaggccctgttctgtagcgagataaaacgtacggctcatgtagctggcctagttttggccattcttagctcttctcaaaccatgatcacttgatcgcccatgtatttcccactgctttcttctaaatcaatgaagcaggtgaacccggatctttcaaaaaaaaacctcctgatgtactcagtgtcgtggccggtgatttaaccgtgtccactgattaattggaatgtatggtgttccaggtcaaaaaagaatgtcaaatgtaattctttcggaaaaaatatagtgcacgcgcaaaaccgtctcaagattggccagtaaaccctctcgcttgctgctccgtcgcatttgatatactcaacagctcctcctgtctaaaaagaaagttcatcacttctgcatttcacgaccaatgcattgcatttgatataaccattccctttctatagtaacacatgtttatgggctcctcgcggctcttctttgcactgcaaccgcctccgcattatttaacacatctaccctcgatctacccgcgcgctaactccaggtttataagcgaagcgaacttttcgcgtccctgaagcgtaaaggatgccgagctcgccggcgcaaatggcacttggccgcgcgagatcaccggcgctggtgctcgccgccgccgttcttggcgcgctctgcatcgtcgcactctcggaggatggtgcgtgtgttcacctgcatggtttttctgggggttttgcgtcagctacgtgcgtgtgtcttttatcatgatcaatggacgctgtgatgatcaatggtgccgtgcgtgtgcagagcaactggagaacctgcggttcgtgcagcacgcgcaggacgcgccgctggtgtcgcactacaactacatcgtggtcggcggcggcacgtccgggtgcccgctggcggcgacgctgtcggagcactcgcgggtgctcctgctggagcgcgggggcctcccctaccgcaacatgtcgaaccaggagcacttcacggacgcgctggccgacacgtcgctggcgtccccggcccagcggttcatctccacggacggcgtggtgaacgcgcgggcgcgggtgctgggcggcgggagctgcctcaacgccggattctacacgcgggccagcaacgagtacgtgcgcacggccgggtgggacgccggcctcgtgaactcgtcgtatcggtgggtggagcgcgcgctggtgttccgccccgacgtgccgccgtggcaggccgcgctccgggacgcgctgctcgaggccggcgtcacccccgacaacggcttcaccttcgatcacgtcacggggaccaagatcggcggcaccatcttcgacaacaacgggcagcgccacacggccgccgacttcctccggcacgcccggccccgggggctcaccgtcgtgctctacgccacggtgtcccggatcctgttcagaagccaggagggggtgccgtatccggtggcgtacggggtggtgttcgcggacccgctgggggtgcagcaccgggtgtacctccgggacggggggaagaacgaggtgatactgtcggcggggacgctggggagcccgcagctgctgatgctgagcggcgtcggcccgcaggcgcacctcgaggcacacggcatccaggtgctggtggaccagcccatggtcgggcagggcgtggccgacaaccccatgaactcggtcttcatcccgtcgccggtgccggtggggctctccctggtgcaggtcgtcgggatcaccaagtccggcagcttcatcgagggcgtgagcggctccgagttcggcatcccggtctccgacggcgcccgccgcctggccagcttcggcctcttctccccccagaccgggcagctcggcacgctgccgccggggcagaggacgccggaggcgctgcagcgcgcggcggaggcgatgaggcggctggacaggcgggcgttccggggcgggttcatcctggagaagatcctggggccggtgtccacgggccacatcgagctgcgcagcaccgacccgcgcgcgaacccggcggtgacgttcaactacttccaggaggcggaggacctggagcggtgcgtccgggggatccagacgatcgagcgggtgatccagtcgcgcgccttctccaacttcacctacgccaacaccaccgtcgagtccatcttcaccgactcggccaacttccccgtcaacctgctgccgcggcacgtcaacgactcccgctcgccggagcagtactgcagggagaccgtcatgaccatctggcactaccacggcggatgccacgtcggcgccgtcgtcgacgacaactaccgggtgttcggggtgagggggctcagggtgatcgacagctccaccttcaggtactcccccggcaccaacccgcaggccaccgtcatgatgctcggcaggtaaacgcaagtctgaaatgaccctcgcaattatactgatctgaatgaatgaatcaactcaactcaactaacacaactatgataaatctgtacaggtatatgggcataaagattcaggccgagagatggaggaaatgatatttcacggagccaaatttgcatgtaattcatggcataatattgtatttgggggacctggtttagaacagattaatttggtttttccacttattctctaggcatagtcttttagtgcctgtttgttgattattatgaaacccatacatccctttaacatgcatttctctgcactgtaaaataagaaggaaaacttatgtcccaaaggcatgatggtggttcaagcaacaatacttcggtaaaaaaatggaaccggttgccacatccacccaccaatttccattgatgacaagaggagcaaaccaaggcccaacattgcttcagaatagtgtgaaggatgcatttacagttttgcactagaaactttgtttcatcaaattacatataacatactactatttctcttggtggttgtcacttgctacaaacgccaggttcccttcagagggatccagcatgtaatcatcttacatatacagggaccgaatacatgtaaaaggaacatgattagttaagatgggaacaaccaaaaggcagaaatgacttgatttttttttccttgtttccaacttgccctacttgcctgctacctacatattggcttgcgaaattctctccctacctatgttatcaggaaccagaaagtgctacttcggcatctctgttgtccataatacccaagaagtcaccaacaattgcatgcttgcataagcagaattcatattgtgaggttttcctggatggccgtgaaggagccacaaatgtttccgcccatgtctgggaatgtcgcacatcctggcaagggtttcaccttgcctttacggtcaacacttacagggtacttgaggaggtggcctctcatctcagtcacctcatttgcaaagaactgatcccagttatgttgcccgagttgacgaacccgcctcatgcactctaggctctctggatggttaaagtcttcctcgataattccaatatgctcagcccagagggacattctgtagccataaatctacataaaaaatcaccaaacttgatttagagtataatccagaaataccagctgcgtcataagtcataactagattattaccctaagagatgagataatatacccagacaacctttttcactgctgttttagaatgcacatattagtatttaattcacataagaactgtacttgtagaattgccaccaacagtatgtatgtgtcattacgtgtctatagtttagtgtatatataattaaaaaaaggtaaatgttaaatgggcgtagttggaggcagtctctctgaaaacgtaaaaaataagtaaggtgaaacaattgtaatgaagcagtggttctaagcaacgcataacatcaggaagacaagtacaaaatctgcaggcacaatctcaaaatgcaagctcatga

SEQ ID NO: 126 - protein, 588 aa, Triticum aestivum
MPSSPAQMALGRARSPTLVLAAAVLGALCVVALSEDEQLENLRFVQHAQDAPLVSHYNYIVVGGGTSGCPLAATLSEHSRVLLLERGGLPYRNMSNQEHFTDALADTSLASPAQRFVSTDGVVNARARVLGGGSCLNAGFYTRASNEYVRTAGWDAGLVNSSYRWVERALVFRPDVPPWQAALRDALLEAGVTPDNGFTFDHVTGTKIGGTIFDNSGQRHTAADFLRHARPRGLTVVLYATVSRILFRSQEGVPYPVAYGVVFADPLGVQHRVYLRDGGKNEVILSAGTLGSPQLLMLSGVGPQAHLEAHGIQVLVDQPMVGQGVADNPMNSVFIPSPVPVGLSLVQVVGITKSGSFIEGVSGSEFGIPVSDGARRLASFGLFSPQTGQLGTLPPGQRTPEALQRAAEAMRRLDRRAFRGGFILEKILGPVSTGHIELRSTDPRANPAVTFNYFQEAEDLERCVRGIQTIERVIQSRAFSNFTYANTTVESIFTDSANFPVNLLPRHVNDSRSPEQYCRETVMTIWHYHGGCHVGAVVDDNYRVFGVRGLRVIDSSTFRYSPGTNPQATVMMLGRYMGIKIQAERWRK

SEQ ID NO: 127 - DNA, 1767 bp, Triticum aestivum
atgccgagctcgccggcgcaaatggcacttggccgcgcgagatcgccgacgctggtgctcgccgccgcggtccttggcgcgctctgcgtcgtcgcactctcggaggacgagcaactggagaacctgcggttcgtgcagcacgcgcaggacgcgccgctggtgtcgcactacaactacatcgtggtcggcggcggcacgtccgggtgcccgctggcggcgacgctgtcggagcactcgcgggtgctgctgctggagcgcgggggcctcccctaccgcaacatgtccaaccaggagcacttcacggatgcgctggccgacacgtcgctggcgtccccggcccagcggttcgtctccacggacggcgtggtgaacgcgcgggcgcgggtgctgggcggcgggagctgcctcaacgccgggttctacacgcgggccagcaacgagtacgtgcgcacggccgggtgggacgccggcctcgtcaactcgtcgtaccggtgggtggagcgcgcgctggtgttccgccccgacgtgccgccgtggcaggccgcgctccgggacgcgctgctcgaggccggcgtcacccccgacaacggcttcaccttcgaccacgtcacggggaccaagatcggcggcaccatcttcgacaacagcgggcagcgccacaccgcggccgacttcctccggcacgcccggccccgggggctcaccgtcgtgctctacgccacggtgtcgcggatcctgttcagaagccaggagggggtgccgtacccggtggcgtacggggtggtgttcgcggacccgctgggggtgcagcaccgggtgtacctccgggacggcgggaagaacgaggtgatactgtcggcggggacgctggggagcccgcagctgctgatgctgagcggcgtgggcccgcaggcgcacctggaggcgcacggcatccaggtgctggtggaccagcccatggtcgggcagggcgtggccgacaaccccatgaactcggtcttcatcccgtcgccggtgccggtggggctctccctggtgcaggtcgtcgggatcaccaagtccggcagcttcatcgagggcgtgagcggctccgagttcggcatcccggtctccgacggcgcccgccgcctggccagcttcggcctcttctccccccagaccgggcagctcggcacgctgccgccggggcagaggacgccggaggcgctgcagcgcgcggcggaggcgatgaggcggctggacaggcgggcgttccggggcggcttcatcctggagaagatcctggggccggtgtcgacggggcacatcgagctgcgcagcaccgacccgcgcgccaacccggccgtgaccttcaactacttccaggaggcggaggacctggagcggtgcgtccgggggatccagacgatcgagcgggtgatccagtcgcgcgccttctccaacttcacctacgccaacaccaccgtcgagtccatcttcaccgactcggccaacttccccgtcaacctgctgccgcggcacgtcaacgactcccgctcgccggagcagtactgcagggagaccgtcatgaccatctggcactaccacggcgggtgccacgtcggcgccgtcgtcgacgacaactaccgggtgttcggggtgagggggctcagggtcatcgacagctccaccttcaggtactcccccggcaccaacccacaggccaccgtcatgatgctcggcaggtatatgggcataaagattcaggccgagagatggaggaaatga

SEQ ID NO: 128 - DNA, 4820 bp, Triticum aestivum
tgcattgtgaaggcagatctcactatcgttggtttatacaatgatggctagatctttacctcatgcctatggagagataaagccctttcatcctcctagcaagacttatatatgagatgatgttgtggtagcagcactaaaaactttttttttagaaaaggagcagcactaaaaacttggggtgattagtagtaatgagctggatttgagaagtgagatgacttcacgcatatatttctaggtattatatatcaagcagaaatatgatattggaagtacttgtgtttgcatggatgatgcaactatgtcggtcagcttgtctcgctacatggatgtttgattcagctaaaccatgttatctctcgcttggtttttgtgcaccatggatgttccagttgatgaatggttccatgtaaagcgctttgcttctatttattttgggaaggaaaacggctctttccattgtccaccgtccatttattttgatcccatgggccagattttagaactcccggtcccggaactaaactaatatttattacttctataaagaatgttggagtatcaggtcttcggggagcctttgcgtgtgaaaatgtcctccgcgttgttcgttgcatgttggccacccgcggttggctccctggggcgctctgggccgtccgatctaggcaggcgcctcacacccggacgacttgcctatgggtccatgccgggggggctgcgggcacggttgggtccatcgtgatgtggtgttttcgatcacaccagtttgtgccctcttgttggttgccttgcgcgtgacgggccgaccctgttggtgtagttcgcttgtgccaggcaagccgcgcacacccccggatcggggtggcgcgtgttaggaaaccggagagggccatccggccagccgtcgcgatggcgggccagccggccaaggttcatttatttgaggcaaatttctttagtgacatccgtgctatggggcgtttgctggggattggtttctagcgaacgttcgccagattatctttaccgctttcttttagtatctaggtttttcttagtattttattatttttctcatagtttggaccgatctcctcacgtcagaatgtcaaatgtaatcctttcgaaaaaaatatagtgcacgcgcgaaaaccgtctcaagattggccagtaaaccctcctgcttactgctccatcgcatttgatatactccttctgtgtaaaaagaatgttcatcacttttgcatttcacaaccaatgcattgcatttgatataaccattccctttctatagtaacacaagtttatgggctcctcgcagctgttctttgcactgcaaccgcctccgcattatttaacagatctaccctcgatctacccgcgcgctaactcgaggtttataaaccaagcgaacttttcgcgtccctgaagcgcaaaggatgccgagctcgccggcgcaaatggcacttggccgcgcgagatcgccgacgctggtgctcgccgccgcggtccttggcgcgctctgcgtcgtcgcactctcggaggacggtgcgtgtgttcacctgcatggtttttctgggggttttgcacgtcagctacgtgcgttgtctcttttatcatgatcactggacgctgtgatgaccaatggtgccatacgtgtgcagagcaactggagaacctgcggttcgtgcagcacgcgcaggacgcgccgctggtgtcgcactacaactacatcgtggtcggcggcggcacgtccgggtgcccgctggcggcgacgctgtcggagcactcgcgggtgctgctgctggagcgcgggggcctcccctaccgcaacatgtccaaccaggagcacttcacggatgcgctggccgacacgtcgctggcgtccccggcccagcggttcgtctccacggacggcgtggtgaacgcgcgggcgcgggtgctgggcggcgggagctgcctcaacgccgggttctacacgcgggccagcaacgagtacgtgcgcacggccgggtgggacgccggcctcgtcaactcgtcgtaccggtgggtggagcgcgcgctggtgttccgccccgacgtgccgccgtggcaggccgcgctccgggacgcgctgctcgaggccggcgtcacccccgacaacggcttcaccttcgaccacgtcacggggaccaagatcggcggcaccatcttcgacaacagcgggcagcgccacaccgcggccgacttcctccggcacgcccggccccgggggctcaccgtcgtgctctacgccacggtgtcgcggatcctgttcagaagccaggagggggtgccgtacccggtggcgtacggggtggtgttcgcggacccgctgggggtgcagcaccgggtgtacctccgggacggcgggaagaacgaggtgatactgtcggcggggacgctggggagcccgcagctgctgatgctgagcggcgtgggcccgcaggcgcacctggaggcgcacggcatccaggtgctggtggaccagcccatggtcgggcagggcgtggccgacaaccccatgaactcggtcttcatcccgtcgccggtgccggtggggctctccctggtgcaggtcgtcgggatcaccaagtccggcagcttcatcgagggcgtgagcggctccgagttcggcatcccggtctccgacggcgcccgccgcctggccagcttcggcctcttctccccccagaccgggcagctcggcacgctgccgccggggcagaggacgccggaggcgctgcagcgcgcggcggaggcgatgaggcggctggacaggcgggcgttccggggcggcttcatcctggagaagatcctggggccggtgtcgacggggcacatcgagctgcgcagcaccgacccgcgcgccaacccggccgtgaccttcaactacttccaggaggcggaggacctggagcggtgcgtccgggggatccagacgatcgagcgggtgatccagtcgcgcgccttctccaacttcacctacgccaacaccaccgtcgagtccatcttcaccgactcggccaacttccccgtcaacctgctgccgcggcacgtcaacgactcccgctcgccggagcagtactgcagggagaccgtcatgaccatctggcactaccacggcgggtgccacgtcggcgccgtcgtcgacgacaactaccgggtgttcggggtgagggggctcagggtcatcgacagctccaccttcaggtactcccccggcaccaacccacaggccaccgtcatgatgctcggcaggtaaacgcaagtctgagatgacccccgcaattatactgatctgaatgaatgaatcaactctactaacacaactatgataactctgtacaggtatatgggcataaagattcaggccgagagatggaggaaatgatatttcacggagccaaatttgcatgtaattcgtggcataatattgtatttgggggacctggtttagaacagattaatttggtttttccacttattctctaggcatagtcttttagtgcctgtttgttgattactatgaaacccagacatccctttaacatgcatttctctgcattgcaaaataagaaagaaaacttatgttgcaaaggcatgatggtggttcaagcaacaatacttcggtaaaaaaatggaaaccggttgcaacatccacccaccaatttccattgatgacaagagtagcaaaccaaggcccaacattgcttcaaaaaactgtgcaggatgcatttacagttttgcactagaaacttagtttcatcaaattacatataacatactactatttctcttggtggttgtcacttgctacaaacgccaggttcccttcagagggatccagcatgtaatcatcttacctatacagggaccgaatacatgtaaaaggaacatgattagttaagacgggaacaaccaaaaggcagaaatgacttgaattttttttccttgtttccaacttgccctacttgcctgctacctacatattggcttgcgaaattctctccctacctatgttatcaggaaccagaaagtgctacttcggcatctctgttgtccagaatacccaagaagccaacaattgcattcttgcataagcagaattcatattgtgaggttttcctggatggccgtgaaggagccacaaatgtttccgcccatgtctgggaatgtcgcacatcctggcaagggtttcaccttgcctttacggtcaacacttacagggtacttgaggaggtggcctctcatctcagtcacctcattggcaaagaactgatcccagttatgttgcccgagttgacgaacccgcctcatgcactctaggctctctggatggttaaagtcttcctcgataattccaatatgctcagcccagagggacattctgtagccataaatctacataaaagatcaccaaacttgatttagagtataatccagaaataccagctgcgtcataactagattattaccctataagagatgagatgatataccccgacaacctttttcacttgctgttttagaatgcacatattagtatttatattcacataagaactgtacttgtataattgccaccaacagtatttatgtgccattacgtgtctatagtttagtgtatatataataaaaaagggtaaatgttaaataggtgtagttggaggcagtctctctgaaaacgtaaaaaataagttaaaacaattgtaatgaagcagcggttctaagcaacgcataacatcaggaagacaagtacaaaatctgcaggcacaatctcaaaatgcaagctc

SEQ ID NO: 129 - DNA, 1356 bp, Triticum aestivum
atgacaggatctttgacccatgattcttctctggctcctaaatgcaacgacaacacaaatattgagctacagagattcaaggtgcagtcgttttctgcagatatcctttctgattcgaccaatctttcttctgaagctgcaagagcaatcaaccaccttcagcatcaactaggaattggtttggagcaggatatgcgaccagtggaaactgcgacctgggatacttctatctgcaccattcaagaccaaataatcaaccatcagcttagcgaagatccacaaaacatattggtgcaacaacagattcaacagtatgatgctgcgctttatccaaacagtggttacacaccagcacctgatctcttaaaccttctccactgcactgtggctccagtgttccctccaacagcatcagtttttggtgatacagcactaagtggtggtaccaactatttggatcttaatgatgagtttacaggagtggcagcaattcctgacagtggattaatgtacactagtgatccggcattgcagttagggtaccatgctgcccagtctcacgcactaaaggatatctgccattcactgccgcaaaattatgggctgttccccagtgaggatgaaagagatgccatccttggggttggaagtgtcggaggagatctttttcaggatatggatgacaggcaatttgatactgtactggagggcagaagagggaagggtgacttcggaaagggaaaaggaaaagctaactttgcgacagagagagagaggagggaacagctaaatgtgaagtataagactttaagaatgctcttccccaatcctaccaagaatgacagggcttcagtagtaggtgatgccattgaatacatagatgagctgaatcgaacagtgaaggaactgaagatcctagtggaacagaagtggcatgggactaataggagaaagataagaaagttggatgaagaggccgctgctgatggtgaaagctcatcgatgaggccaataagggatgagcaagacaatcagcttgatggggccataagaagctcatgggttcagaggaggtccagggagtgccatgttgatgttcgcatagtggaaaatgaaataaacatcaagctcacagaaaagaagacgaccaactcctccctgcttcatgttgcaaaggttcttgatgaattccatcttgagatcatccatgtggttggagggattattggtgatcactacatattcatgtttaacactaaggtgtctgaaggttcctcaatttatgcttgtgcagtggcaaagaggatccttcaagcagtggatgcacaacaccaggcacttgacatattcaactag

SEQ ID NO: 130 - DNA, 1449 bp, Triticum aestivum
  modified_base (106)..(111): a, c, t, g, unknown or other
atgggacttctctacacggaagaacagacagccacattgcatagcttaaaactccacggctctacctcttttgcaacaaccaaaacagccaggccaactgcaattnnnnnncatgattcttctctggctcctaaatgcaacgacaacacaaatattgagctacagagattcaaggtgcagtcgttttctgcagatatcctttctgattcgaccaatctttcttctgaagctgcaagagcgatcaaccacctccagcatcaactaggaattggtttggagcaggatatgccgccagtgggaactgcgacctgggatacttctatctgcaccattcaagaccaaattatcaaccatcagcttagcgaagatccacaaaacatattggtgcaacaacagattcaacagtatgatgctgcgctttatccaaacagtggttacacaccagcacctgatctcttaaaccttctccactgcactgtggctccagtgttccctgcaacagcatcagtctttggtgatacagcactaagtggtgataccaactatttggatcttaatggtgagtttacaggagtggcagcaattcctgacagtggattaatgtacactagtgatccagcattgcagttagggtaccatgctgcccagtctcacgcactaaaggatatctgccattcactgccgcaaaattatgggctcttccccagtgaggatgaaagagatgtcatgcttggggttggaagtgtcggaggagatctttttcaggatatagatgacaggcaatttgatactgtactggagggcagaagaggaaagggtgagttcggaaaaggaaaaggaaaagctaactttgcgactgagagagagaggagggaacaactcaatgtgaagtataagacgttaagaatgctcttccccaaccctaccaagaatgacagggcttcagtagtaggtgatgccattgaatacatagatgagctgaatcgaacagtgaaggaactgaagatcctagtggaacagaagtggcatgggactaataggagaaagataagaaagttggatgaagaggcggctgctgatggtgaaagctcatcgatgaggccaatgagggatgagcaagacaatcagcttgatggggccataagaagctcatgggttcagaggaggtccagggagtgccatgttgatgttcgcatagtggaaaatgaaataaacatcaagctcacagaaaagaagaagaccaactcctccctgcttcatgttgcaaaggttcttgatgaattccatcttgagatcatccatgtagttggagggattattggtgatcactacatattcatgtttaacactaaggtgactgaaggttcctcagtttatgcttgtgcagtggcaaagaggatccttcaagcagtggatgcacaacaccaggcacttgacatattcaactag

SEQ ID NO: 131 - DNA, 22 bp, Artificial Sequence
  Description of Artificial Sequence: Synthetic oligonucleotide
cccacggctgggactactgcat

SEQ ID NO: 132 - DNA, 22 bp, Artificial Sequence
  Description of Artificial Sequence: Synthetic oligonucleotide
cctccagcggcggcgagaagac

SEQ ID NO: 133 - DNA, 22 bp, Artificial Sequence
  Description of Artificial Sequence: Synthetic oligonucleotide
ggctcctcgtccccgtcgccgg

SEQ ID NO: 134 - DNA, 22 bp, Artificial Sequence
  Description of Artificial Sequence: Synthetic oligonucleotide
cctcggggacgcgatcgactac

SEQ ID NO: 135 - DNA, 22 bp, Artificial Sequence
  Description of Artificial Sequence: Synthetic oligonucleotide
cccacggctgggactactgcat

SEQ ID NO: 136 - DNA, 22 bp, Artificial Sequence
  Description of Artificial Sequence: Synthetic oligonucleotide
cctccagcggcggcgagaagac

SEQ ID NO: 137 - DNA, 22 bp, Artificial Sequence
  Description of Artificial Sequence: Synthetic oligonucleotide
ggctcctcgtccccgtcgccgg

SEQ ID NO: 138 - DNA, 22 bp, Artificial Sequence
  Description of Artificial Sequence: Synthetic oligonucleotide
cctcggggacgcgatcgactac

SEQ ID NO: 139 - DNA, 22 bp, Artificial Sequence
  Description of Artificial Sequence: Synthetic oligonucleotide
cccacggctgggactactgcat

SEQ ID NO: 140 - DNA, 22 bp, Artificial Sequence
  Description of Artificial Sequence: Synthetic oligonucleotide
cctccagcggcggcgagaagac

SEQ ID NO: 141 - DNA, 22 bp, Artificial Sequence
  Description of Artificial Sequence: Synthetic oligonucleotide
ggctcctcgtccccgtcgccgg

SEQ ID NO: 142 - DNA, 22 bp, Artificial Sequence
  Description of Artificial Sequence: Synthetic oligonucleotide
cctcggggacgcgatcgactac

SEQ ID NO: 143 - DNA, 22 bp, Artificial Sequence
  Description of Artificial Sequence: Synthetic oligonucleotide
attgagctacagagattcaagg

SEQ ID NO: 144 - DNA, 22 bp, Artificial Sequence
  Description of Artificial Sequence: Synthetic oligonucleotide
cctgggatacttctatctgcac

SEQ ID NO: 145 - DNA, 22 bp, Artificial Sequence
  Description of Artificial Sequence: Synthetic oligonucleotide
ccagcacctgatctcttaaacc

SEQ ID NO: 146 - DNA, 22 bp, Artificial Sequence
  Description of Artificial Sequence: Synthetic oligonucleotide
ccccagtgaggatgaaagagat

SEQ ID NO: 147 - DNA, 22 bp, Artificial Sequence
  Description of Artificial Sequence: Synthetic oligonucleotide
attgagctacagagattcaagg

SEQ ID NO: 148 - DNA, 22 bp, Artificial Sequence
  Description of Artificial Sequence: Synthetic oligonucleotide
cctgggatacttctatctgcac

SEQ ID NO: 149 - DNA, 22 bp, Artificial Sequence
  Description of Artificial Sequence: Synthetic oligonucleotide
ccagcacctgatctcttaaacc

SEQ ID NO: 150 - DNA, 22 bp, Artificial Sequence
  Description of Artificial Sequence: Synthetic oligonucleotide
ccccagtgaggatgaaagagat

SEQ ID NO: 151 - DNA, 22 bp, Artificial Sequence
  Description of Artificial Sequence: Synthetic oligonucleotide
cctgggatacttctatctgcac

SEQ ID NO: 152 - DNA, 22 bp, Artificial Sequence
  Description of Artificial Sequence: Synthetic oligonucleotide
ccagcacctgatctcttaaacc

SEQ ID NO: 153 - DNA, 22 bp, Artificial Sequence
  Description of Artificial Sequence: Synthetic oligonucleotide
ccagcacctgatctcttaaacc

SEQ ID NO: 154 - DNA, 22 bp, Artificial Sequence
  Description of Artificial Sequence: Synthetic oligonucleotide
ccccagtgaggatgaaagagat
